(19) United States
(12) Patent Application Publication
(10) Pub. No.: US 2016/0010104 A1
(43) Pub. Date: Jan. 14, 2016

(54) PLANTS HAVING ENHANCED YIELD-RELATED TRAITS AND A METHOD FOR MAKING THE SAME

(71) Applicants: CropDesign N.V., Zwijnaarde (BE); Crop Functional Genomics Center, Seoul (KR)

(72) Inventors: Yang Do Choi, Seoul (KR); Ju Kon Kim, Seoul (KR); Baek Hie Nahm, Seoul (KR); Jin Seo Jeong, Seoul (KR); Se-Jun Oh, Seoul (KR); Chang-Deok Han, Seoul (KR); Sung Han Park, Seoul (KR); Pil Joong Chung, Seoul (KR)

(21) Appl. No.: 14/862,306

(22) Filed: Sep. 23, 2015

Related U.S. Application Data
(62) Division of application No. 12/304,581, filed on Dec. 12, 2008, now abandoned.
(60) Provisional application No. 60/816,447, filed on Jun. 26, 2006.
(60) Provisional application No. 60/816,444, filed on Jun. 26, 2006.
(60) Provisional application No. 60/889,957, filed on Feb. 15, 2007.
(60) Provisional application No. 60/891,045, filed on Feb. 22, 2007.
(60) Provisional application No. 60/891,047, filed on Feb. 22, 2007.

(30) Foreign Application Priority Data
Jun. 15, 2006 (EP) 06447081.8
Jun. 15, 2006 (EP) 06447082.6
Jan. 19, 2007 (EP) 07100862.7
Jan. 31, 2007 (EP) 07101534.1
Jan. 31, 2007 (EP) 07101535.8

(51) Int. Cl. C12N 15/82; C07K 14/415

(52) U.S. Cl. CPC C12N 15/8261; C07K 14/415

(57) ABSTRACT

The present invention concerns a method for enhancing yield-related traits in plants by modulating expression of a particular type of NAC transcription factor, an AP2-2 polypeptide, or an APETELA2-70-like (AP2-70-like) polypeptide in plants. The particular type of NAC transcription factor is one having an amino acid sequence, which when used in the construction of a NAC phylogenetic tree, tends to cluster with the group of NACs comprising the amino acid sequence represented by SEQ ID NO: 2, 51, 53, 55, 57 or 59 rather than with any other NAC group. The present invention also concerns plants having modulated expression of a nucleic acid encoding such a NAC transcription factor, AP2-2 polypeptide, or AP2-70-like polypeptide, which plants have enhanced yield-related traits relative to control plants. The invention also provides hitherto unknown NAC, AP2-2 and AP2-70-like-encoding nucleic acids, and constructs comprising the same, useful in performing the methods of the invention.

### RELATED APPLICATIONS

[0001] This application is a divisional of patent application Ser. No. 12/304,581 filed Dec. 12, 2008, which is a national stage application (under 35 U.S.C. §371) of PCT/EP2007/005292, filed Jun. 15, 2007, which claims benefit of European application 06447081.8, filed Jun. 15, 2006, European application 06447082.6, filed Jun. 15, 2006, U.S. Provisional application 60/816,444, filed Jun. 26, 2006, U.S. Provisional application 60/816,447, filed Jun. 26, 2006, European application 07100862.7, filed Jan. 19, 2007, European application 07101534.1, filed Jan. 31, 2007, European application 07101535.8, filed Jan. 31, 2007, U.S. Provisional application 60/889,957, filed Feb. 15, 2007, U.S. Provisional application 60/891,045, filed Feb. 22, 2007 and U.S. Provisional application 60/891,047 filed Feb. 22, 2007. The entire content of each aforementioned application is hereby incorporated by reference in its entirety.

### SUBMISSION OF SEQUENCE LISTING

[0002] The Sequence Listing associated with this application is filed in electronic format via EFS-Web and hereby incorporated by reference into the specification in its entirety. The name of the text file containing the Sequence Listing is Sequence_Listing_{—}074029_{—}0045_{—}01. The size of the text file is 738 KB, and the text file was created on Sep. 22, 2015.

[0003] The present invention relates generally to the field of molecular biology and concerns a method for enhancing various economically important yield-related traits in plants. More specifically, the present invention concerns methods for enhancing yield-related traits in plants by modulating expression in a plant of a nucleic acid encoding a particular type of NAC transcription factor. The present invention also concerns plants having modulated expression of a nucleic acid encoding a NAC transcription factor, which plants have enhanced yield-related traits relative to control plants.

[0004] In addition, the present invention concerns a method for enhancing yield-related traits in plants by modulating expression in a plant of a nucleic acid encoding a Apetala 2-2 (AP2-2) polypeptide. The present invention also concerns plants having modulated expression of a nucleic acid encoding an AP2-2 polypeptide, which plants have enhanced yield-related traits relative to control plants. The present invention also concerns a method for enhancing yield-related traits in plants by modulating expression in a plant of a nucleic acid encoding an APETALA2-70-like (AP2-70-like) polypeptide. The present invention also concerns plants having modulated expression of a nucleic acid encoding an AP2-70-like polypeptide, which plants have enhanced yield-related traits relative to control plants. The invention also provides hitherto unknown AP2-70-like-encoding nucleic acids, and constructs comprising the same, useful in performing the methods of the invention.

[0005] The invention also provides constructs useful in the methods of the invention.

[0006] The ever-increasing world population and the dwindling supply of arable land available for agriculture fuels research towards increasing the efficiency of agriculture. Conventional means for crop and horticultural improvements utilise selective breeding techniques to identify plants having desirable characteristics. However, such selective breeding techniques have several drawbacks, namely that these techniques are typically labour intensive and result in plants that often contain heterogeneous genetic components that may not always result in the desirable trait being passed on from parent plants. Advances in molecular biology have allowed mankind to modify the germplasm of animals and plants. Genetic engineering of plants entails the isolation and manipulation of genetic material (typically in the form of DNA or RNA) and the subsequent introduction of that genetic material into a plant. Such technology has the capacity to deliver crops or plants having various improved economic, agronomic and horticultural traits.

[0007] A trait of particular economic interest is increased yield. Yield is normally defined as the measurable produce of economic value from a crop. This may be defined in terms of quantity and/or quality. Yield is directly dependent on several factors, for example, the number and size of the organs, plant architecture (for example, the number of branches), seed production leaf senescence and more. Root development, nutrient uptake, stress tolerance and early vigour may also be important factors in determining yield. Optimizing the abovementioned factors may therefore contribute to increasing crop yield.

[0008] Seed yield is a particularly important trait, since the seeds of many plants are important for human and animal nutrition. Crops such as, corn, rice, wheat, canola and soybean account for over half the total human caloric intake, whether through direct consumption of the seeds themselves or through consumption of meat products raised on processed seeds. They are also a source of sugars, oils and many kinds of metabolites used in industrial processes. Seeds contain an embryo (the source of new shoots and roots) and an endosperm (the source of nutrients for embryo growth during germination and during early growth of seedlings). The development of a seed involves many genes, and requires the transfer of metabolites from the roots, leaves and stems into the growing seed. The endosperm, in particular, assimilates the metabolic precursors of carbohydrates, oils and proteins and synthesizes them into storage macromolecules to fill out the grain.

[0009] A further trait of economic importance for many crops is early vigour. Improving early vigour is an important objective of modern rice breeding programs in both temperate and tropical rice cultivars. Long roots are important for proper soil anchorage in water-seeded rice. Where rice is sown directly into flooded fields, and where plants must emerge rapidly through water, longer shoots are associated with vigour. Where drill-seeding is practiced, longer mesocotyls and coleoptiles are important for good seedling emergence. Early vigour may also result from increased plant fitness due to, for example, the plants being better adapted to their environment (i.e. being more able to cope with various abiotic or biotic stress factors). Plants having early vigour also show better establishment of the crop (with the crop growing in a more uniform manner, i.e. with the majority of plants reaching the various stages of development at substantially the same time), and show better growth and often better yield.

[0010] A further important trait is improved abiotic stress tolerance. Abiotic stress is a primary cause of crop loss worldwide, reducing average yields for most major crop plants by more than 50% (Wang et al., Planta (2003) 218: 1-14). Abiotic stresses may be caused by drought, salinity, extremes of temperature, chemical toxicity and oxidative stress. The ability to improve plant tolerance to abiotic stress would be of great economic advantage to farmers worldwide and would allow for the cultivation of crops during adverse conditions and in territories where cultivation of crops may not otherwise be possible.

[0011] The ability to engineer abiotic stress tolerance or early vigour into plants would be of great importance in agriculture, as would the ability to increase plant seed yield, whether through seed number, seed biomass, seed development, seed filling, or any other seed-related trait. Aside form the many applications in agriculture including in the production of ornamental plants, arboriculture, horticulture and forestry, increasing yield would also have many non-agricultural uses, such as in the production of algae for use in bioreactors (for the biotechnological production of substances such as pharmaceuticals, antibodies or vaccines or for the bioconversion of organic waste) and other such areas.

[0012] Transcription factors are usually defined as proteins that show sequence-specific DNA binding and that are capable of activating and/or repressing transcription. The Arabidopsis genome codes for at least 1533 transcriptional regulators, which account for ˜5.9% of its estimated total number of genes. About 45% of these transcription factors are reported to be from families specific to plants (Riechmann et al., 2000 (Science Vol. 290, 2105-2109)).

[0013] The present invention concerns the use of a particular type of NAC transcription factor for enhancing yield-related traits in plants.

[0014] NAC is an acronym derived from the names of the three genes first described as containing a NAC domain, namely NAM (no apical meristem), ATAF1,2 and CUC2 (cup-shaped cotyledon). NAC proteins appear to be widespread in plants, with the genome of Arabidopsis thaliana estimated to contain at least a hundred NAC-encoding genes, but without any examples having been found to date in other eukaryotes (Riechmann et al., 2000).

[0015] The NAC protein family comprises a variety of plant proteins that are identifiable by the presence of a highly conserved N-terminal NAC domain, accompanied by diverse C-terminal domains. The DNA-binding ability of NAC proteins is generally localized to the NAC domain, with the C-terminal regions constituting transcriptional activation domains. Several NAC genes have been found to be hormone inducible. NAC domains have also been implicated in interactions with other proteins, such as viral proteins and RING finger proteins. NAC proteins have also been implicated in transcriptional control in a variety of plant processes, including in the development of the shoot apical meristem and floral organs, and in the formation of lateral roots. NAC proteins have also been implicated in responses to stress and viral infections, Ernst et al., 2004 (EMBO Reports 5, 3, 297-303).

[0016] U.S. Pat. No. 6,844,486 describes a member of the NAC family, NACl, isolated from Arabidopsis thaliana. NACl was reported to be involved in the regulation of cotyledon and lateral root development. Overexpression of the nacl gene was reported to give larger plants with larger roots and more lateral roots than wild-type plants.

[0017] Surprisingly, it has now been found that modulating expression in a plant of a nucleic acid encoding a particular type of NAC transcription factor gives plants having enhanced yield-related traits relative to control plants. The particular class of NAC transcription factor suitable for enhancing yield-related traits in plants is described in detail below.

[0018] The present invention provides a method for enhancing yield-related traits in plants relative to control plants, comprising modulating expression in a plant of a nucleic acid encoding a particular type of NAC transcription factor.

[0019] In addition, the present invention concerns the use of an Apetala type transcription factor, AP2-2, for enhancing yield-related traits in plants.

[0020] AP2 (APETALA2) and EREBPs (ethylene-responsive element binding proteins, or ERF, ethylene response factors) are the prototypic members of a family of transcription factors unique to plants, whose distinguishing characteristic is that they contain the so-called AP2 DNA-binding domain. AP2/EREBP genes form a large multigene family (the AP2/ERF superfamily), and they play a variety of roles throughout the plant life cycle: from being key regulators of several developmental processes, like floral organ identity determination or control of leaf epidermal cell identity, to forming part of the mechanisms used by plants to respond to various types of biotic and environmental stress. Within the AP2/ERF superfamily, 3 large families are discriminated: the AP2 family with two AP2/ERF domains, the ERF family with a single AP2/ERF domain and the RAV family comprising a B3-type DNA binding domain. Nakano et al. (Plant Physiology 140, 411-432, 2006) studied the ERF gene family in Arabidopsis and rice, and divided the Arabidopsis ERF gene family into 12 groups (designated Group I to X, and a Group VI-like and Group Xb-like), whereas in the case of rice 15 groups were discriminated. The Arabidopsis Group VII proteins are characterised by a conserved N-terminal motif, referred to as Conserved Motif VII-1 (CMVII-1). In rice, Group VII comprises more proteins than the Arabidopsis Group VII, and though many conserved motifs are in common between the rice and Arabidopsis Group VII, a separate rice Group VIIb was created for a sequence lacking this typical CMVII-1 motif. Functionally, members of Group VII are described to be involved in osmotic stress and disease responses (for example in WO 2003007699). Ectopic overexpression of tomato JERF3 in tobacco increased the salt tolerance of the transgenics (Wang et al., Plant Molecular Biology 58, 183-192, 2004), and pepper transcription factor CaPF1 overexpression resulted in increased osmotic tolerance in pine (Tang et al, Plant Cell Rep. 26, 115-124, 2007), but also increased pathogen resistance in Arabidopsis (Yi et al., Plant Physiol. 136, 2862-2874, 2004). A similar observation was made for barley HvRAF (Jung et al., Planta Epub 26 Aug. 2006). Furthermore, a Group VII type ERF protein was used in a process for the production of Methionine (EP2005003297).

[0021] Surprisingly, it has now been found that modulating expression in a plant of a nucleic acid encoding a Group VII ERF protein (hereafter named AP2-2 polypeptide) gives plants having enhanced yield-related traits relative to control plants. These enhanced yield-related traits were not the result of increased stress resistance.

[0022] The ERF (Ethylene Response Factor) family is a large gene family of transcription factors and is part of the AP2/ERF superfamily, which also contains the AP2 and RAV families. The AP2/ERF superfamily is defined by the AP2/ERF domain, which consists of about 60 to 70 amino acids and is involved in DNA binding. These three families have been defined as follows. The AP2 family of proteins contain two repeated AP2/ERF domains, the ERF family of proteins contain a single AP2/ERF domain, and the RAV family proteins contain a B3 domain, which is a DNA-binding domain conserved in other plant-specific transcription factors, including VP1/ABI3, in addition to the single AP2/ERF domain. The ERF family is sometimes further divided into two major subfamilies, the ERF subfamily and the CBF/DREB subfamily. 147 genes have been identified in the AP2/ERF superfamily in the Arabidopsis genome, including 122 genes in the ERF family. The AP2 domain was first identified as a repeated motif within the Arabidopsis (Arabidopsis thaliana) AP2 protein, which is involved in flower development. Nakano et al., 2006 (Plant Physiol. Vol. 140, pp. 411-432).

[0023] Nakano et al., 2006 further report that genes in the AP2 family have been shown to participate in the regulation of developmental processes, e.g. flower development, spikelet meristem determinacy, leaf epidermal cell identity, and embryo development. Several proteins in the ERF family have been identified and implicated in many diverse functions in cellular processes, such as hormonal signal transduction, response to biotic and abiotic stresses, and regulation of metabolism, and in developmental processes in various plant species.

[0024] Surprisingly, it has now been found that modulating expression in a plant of a nucleic acid encoding an AP2-70-like polypeptide gives plants having enhanced yield-related traits relative to control plants.

[0025] AP2-70-like polypeptides described herein as being useful in enhancing yield-related traits in plants are classified in Group Ib (A-6) according to the classification system of Nakano et al., 2006. Nakano reports that DBF1 from maize (Zea mays)—a member of Group Ib—has been shown to activate the drought-responsive element 2 (DRE2)-dependent transcription of ABA-responsive rab17 in transiently transformed maize callus. In another Group Ib member, Medicago truncatula WXP1, overexpression of the same was reported to activate wax production in transgenic alfalfa (Medicago sativa).

### DEFINITIONS

### Polypeptide(s)/Protein(s)

[0026] The terms “polypeptide” and “protein” are used interchangeably herein and refer to amino acids in a polymeric form of any length, linked together by peptide bonds.

### Polynucleotide(s)/Nucleic Acid(s)/Nucleic Acid Sequence(s)/Nucleotide Sequence(s)

[0027] The terms “polynucleotide(s)”, “nucleic acid sequence(s)”, “nucleotide sequence(s)”, “nucleic acid(s)”, “nucleic acid molecule” are used interchangeably herein and refer to nucleotides, either ribonucleotides or deoxyribonucleotides or a combination of both, in a polymeric unbranched form of any length.

### Control Plant(s)

[0028] The choice of suitable control plants is a routine part of an experimental setup and may include corresponding wild type plants or corresponding plants without the gene of interest. The control plant is typically of the same plant species or even of the same variety as the plant to be assessed. The control plant may also be a nullizygote of the plant to be assessed. Nullizygotes are individuals missing the transgene by segregation. A “control plant” as used herein refers not only to whole plants, but also to plant parts, including seeds and seed parts.

### Homologue(s)

[0029] “Homologues” of a protein encompass peptides, oligopeptides, polypeptides, proteins and enzymes having amino acid substitutions, deletions and/or insertions relative to the unmodified protein in question and having similar biological and functional activity as the unmodified protein from which they are derived.

[0030] A deletion refers to removal of one or more amino acids from a protein.

[0031] An insertion refers to one or more amino acid residues being introduced into a predetermined site in a protein. Insertions may comprise N-terminal and/or C-terminal fusions as well as intra-sequence insertions of single or multiple amino acids. Generally, insertions within the amino acid sequence will be smaller than N- or C-terminal fusions, of the order of about 1 to 10 residues. Examples of N- or C-terminal fusion proteins or peptides include the binding domain or activation domain of a transcriptional activator as used in the yeast two-hybrid system, phage coat proteins, (histidine)-6-tag, glutathione S-transferase-tag, protein A, maltose-binding protein, dihydrofolate reductase, Tag•100 epitope, c-myc epitope, FLAG®-epitope, lacZ, CMP (calmodulin-binding peptide), HA epitope, protein C epitope and VSV epitope.

[0032] A substitution refers to replacement of amino acids of the protein with other amino acids having similar properties (such as similar hydrophobicity, hydrophilicity, antigenicity, propensity to form or break α-helical structures or β-sheet structures). Amino acid substitutions are typically of single residues, but may be clustered depending upon functional constraints placed upon the polypeptide; insertions will usually be of the order of about 1 to 10 amino acid residues. The amino acid substitutions are preferably conservative amino acid substitutions. Conservative substitution tables are well known in the art (see for example Creighton (1984) Proteins. W.H. Freeman and Company (Eds) and Table 1 below).

TABLE 1
Examples of conserved amino acid substitutions

| | Conservative |
|---|---|
| Residue | Substitutions |
| Ala | Ser |
| Arg | Lys |
| Asn | Gln; His |
| Asp | Glu |
| Gln | Asn |
| Cys | Ser |
| Glu | Asp |
| Gly | Pro |
| His | Asn; Gln |
| Ile | Leu, Val |
| Leu | Ile; Val |
| Lys | Arg; Gln |
| Met | Leu; Ile |
| Phe | Met; Leu; Tyr |
| Ser | Thr; Gly |
| Thr | Ser; Val |
| Trp | Tyr |
| Tyr | Trp; Phe |
| Val | Ile; Leu |

[0033] Amino acid substitutions, deletions and/or insertions may readily be made using peptide synthetic techniques well known in the art, such as solid phase peptide synthesis and the like, or by recombinant DNA manipulation. Methods for the manipulation of DNA sequences to produce substitution, insertion or deletion variants of a protein are well known in the art. For example, techniques for making substitution mutations at predetermined sites in DNA are well known to those skilled in the art and include M13 mutagenesis, T7-Gen in vitro mutagenesis (USB, Cleveland, Ohio), QuickChange Site Directed mutagenesis (Stratagene, San Diego, Calif.), PCR-mediated site-directed mutagenesis or other site-directed mutagenesis protocols.

### Derivatives

[0034] “Derivatives” include peptides, oligopeptides, polypeptides which may, compared to the amino acid sequence of the naturally-occurring form of the protein, such as the protein of interest, comprise substitutions of amino acids with non-naturally occurring amino acid residues, or additions of non-naturally occurring amino acid residues. “Derivatives” of a protein also encompass peptides, oligopeptides, polypeptides which comprise naturally occurring altered (glycosylated, acylated, prenylated, phosphorylated, myristoylated, sulphated etc.) or non-naturally altered amino acid residues compared to the amino acid sequence of a naturally-occurring form of the polypeptide. A derivative may also comprise one or more non-amino acid substituents or additions compared to the amino acid sequence from which it is derived, for example a reporter molecule or other ligand, covalently or non-covalently bound to the amino acid sequence, such as a reporter molecule which is bound to facilitate its detection, and non-naturally occurring amino acid residues relative to the amino acid sequence of a naturally-occurring protein. Furthermore, “derivatives” also include fusions of the naturally-occurring form of the protein with tagging peptides such as FLAG, HIS6 or thioredoxin (for a review of tagging peptides, see Terpe, Appl. Microbiol. Biotechnol. 60, 523-533, 2003).

### Orthologue(s)/Paralogue(s)

[0035] Orthologues and paralogues encompass evolutionary concepts used to describe the ancestral relationships of genes. Paralogues are genes within the same species that have originated through duplication of an ancestral gene; orthologues are genes from different organisms that have originated through speciation, and are also derived from a common ancestral gene.

### Domain

[0036] The term “domain” refers to a set of amino acids conserved at specific positions along an alignment of sequences of evolutionarily related proteins. While amino acids at other positions can vary between homologues, amino acids that are highly conserved at specific positions indicate amino acids that are likely essential in the structure, stability or function of a protein. Identified by their high degree of conservation in aligned sequences of a family of protein homologues, they can be used as identifiers to determine if any polypeptide in question belongs to a previously identified polypeptide family.

### Motif/Consensus Sequence/Signature

[0037] The term “motif” or “consensus sequence” or “signature” refers to a short conserved region in the sequence of evolutionarily related proteins. Motifs are frequently highly conserved parts of domains, but may also include only part of the domain, or be located outside of conserved domain (if all of the amino acids of the motif fall outside of a defined domain).

### Hybridisation

[0038] The term “hybridisation” as defined herein is a process wherein substantially homologous complementary nucleotide sequences anneal to each other. The hybridisation process can occur entirely in solution, i.e. both complementary nucleic acids are in solution. The hybridisation process can also occur with one of the complementary nucleic acids immobilised to a matrix such as magnetic beads, Sepharose beads or any other resin. The hybridisation process can furthermore occur with one of the complementary nucleic acids immobilised to a solid support such as a nitro-cellulose or nylon membrane or immobilised by e.g. photolithography to, for example, a siliceous glass support (the latter known as nucleic acid arrays or microarrays or as nucleic acid chips). In order to allow hybridisation to occur, the nucleic acid molecules are generally thermally or chemically denatured to melt a double strand into two single strands and/or to remove hairpins or other secondary structures from single stranded nucleic acids.

[0039] The term “stringency” refers to the conditions under which a hybridisation takes place. The stringency of hybridisation is influenced by conditions such as temperature, salt concentration, ionic strength and hybridisation buffer composition. Generally, low stringency conditions are selected to be about 30° C. lower than the thermal melting point (Tₘ) for the specific sequence at a defined ionic strength and pH. Medium stringency conditions are when the temperature is 20° C. below Tₘ, and high stringency conditions are when the temperature is 10° C. below Tₘ. High stringency hybridisation conditions are typically used for isolating hybridising sequences that have high sequence similarity to the target nucleic acid sequence. However, nucleic acids may deviate in sequence and still encode a substantially identical polypeptide, due to the degeneracy of the genetic code. Therefore medium stringency hybridisation conditions may sometimes be needed to identify such nucleic acid molecules.

[0040] The Tm is the temperature under defined ionic strength and pH, at which 50% of the target sequence hybridises to a perfectly matched probe. The Tₘ is dependent upon the solution conditions and the base composition and length of the probe. For example, longer sequences hybridise specifically at higher temperatures. The maximum rate of hybridisation is obtained from about 16° C. up to 32° C. below Tₘ. The presence of monovalent cations in the hybridisation solution reduce the electrostatic repulsion between the two nucleic acid strands thereby promoting hybrid formation; this effect is visible for sodium concentrations of up to 0.4M (for higher concentrations, this effect may be ignored). Formamide reduces the melting temperature of DNA-DNA and DNA-RNA duplexes with 0.6 to 0.7° C. for each percent formamide, and addition of 50% formamide allows hybridisation to be performed at 30 to 45° C., though the rate of hybridisation will be lowered. Base pair mismatches reduce the hybridisation rate and the thermal stability of the duplexes. On average and for large probes, the Tm decreases about 1° C. per % base mismatch. The Tm may be calculated using the following equations, depending on the types of hybrids:

1) DNA-DNA hybrids (Meinkoth and Wahl, Anal. Biochem., 138: 267-284, 1984):

Tₘ=81.5° C.+16.6x log₁₀[Na⁺]^{a}+0.41x %[G/C^{b}]−500x[L^{c}]⁻¹−0.61x % formamide

2) DNA-RNA or RNA-RNA hybrids:

Tm=79.8+18.5(log₁₀[Na⁺]^{a})+0.58(% G/C^{b})+11.8(% G/C^{b})²−820/L^{c}

3) oligo-DNA or oligo-RNA^{d} hybrids:

[0041] For <20 nucleotides: Tₘ=2 (Iₙ)

[0042] For 20-35 nucleotides: Tₘ=22+1.46 (Iₙ) ^{a} or for other monovalent cation, but only accurate in the 0.01-0.4 M range.^{b} only accurate for % GC in the 30% to 75% range.^{c} L=length of duplex in base pairs.^{d} oligo, oligonucleotide; Iₙ, =effective length of primer=2×(no. of G/C)+(no. of NT).

[0043] Non-specific binding may be controlled using any one of a number of known techniques such as, for example, blocking the membrane with protein containing solutions, additions of heterologous RNA, DNA, and SDS to the hybridisation buffer, and treatment with Rnase. For non-homologous probes, a series of hybridizations may be performed by varying one of (i) progressively lowering the annealing temperature (for example from 68° C. to 42° C.) or (ii) progressively lowering the formamide concentration (for example from 50% to 0%). The skilled artisan is aware of various parameters which may be altered during hybridisation and which will either maintain or change the stringency conditions.

[0044] Besides the hybridisation conditions, specificity of hybridisation typically also depends on the function of post-hybridisation washes. To remove background resulting from non-specific hybridisation, samples are washed with dilute salt solutions. Critical factors of such washes include the ionic strength and temperature of the final wash solution: the lower the salt concentration and the higher the wash temperature, the higher the stringency of the wash. Wash conditions are typically performed at or below hybridisation stringency. A positive hybridisation gives a signal that is at least twice of that of the background. Generally, suitable stringent conditions for nucleic acid hybridisation assays or gene amplification detection procedures are as set forth above. More or less stringent conditions may also be selected. The skilled artisan is aware of various parameters which may be altered during washing and which will either maintain or change the stringency conditions.

[0045] For example, typical high stringency hybridisation conditions for DNA hybrids longer than 50 nucleotides encompass hybridisation at 65° C. in 1×SSC or at 42° C. in 1×SSC and 50% formamide, followed by washing at 65° C. in 0.3×SSC. Examples of medium stringency hybridisation conditions for DNA hybrids longer than 50 nucleotides encompass hybridisation at 50° C. in 4×SSC or at 40° C. in 6×SSC and 50% formamide, followed by washing at 50° C. in 2×SSC. The length of the hybrid is the anticipated length for the hybridising nucleic acid. When nucleic acids of known sequence are hybridised, the hybrid length may be determined by aligning the sequences and identifying the conserved regions described herein. 1×SSC is 0.15M NaCl and 15 mM sodium citrate; the hybridisation solution and wash solutions may additionally include 5×Denhardt's reagent, 0.5-1.0% SDS, 100 μg/ml denatured, fragmented salmon sperm DNA, 0.5% sodium pyrophosphate.

[0046] For the purposes of defining the level of stringency, reference can be made to Sambrook et al. (2001) Molecular Cloning: a laboratory manual, 3^{rd} Edition, Cold Spring Harbor Laboratory Press, CSH, New York or to Current Protocols in Molecular Biology, John Wiley & Sons, N.Y. (1989 and yearly updates).

### Splice Variant

[0047] The term “splice variant” as used herein encompasses variants of a nucleic acid sequence in which selected introns and/or exons have been excised, replaced, displaced or added, or in which introns have been shortened or lengthened. Such variants will be ones in which the biological activity of the protein is substantially retained; this may be achieved by selectively retaining functional segments of the protein. Such splice variants may be found in nature or may be manmade. Methods for predicting and isolating such splice variants are well known in the art (see for example Foissac and Schiex (2005) BMC Bioinformatics 6: 25).

### Allelic Variant

[0048] Alleles or allelic variants are alternative forms of a given gene, located at the same chromosomal position. Allelic variants encompass Single Nucleotide Polymorphisms (SNPs), as well as Small Insertion/Deletion Polymorphisms (INDELs). The size of INDELs is usually less than 100 bp. SNPs and INDELs form the largest set of sequence variants in naturally occurring polymorphic strains of most organisms.

### Gene Shuffling/Directed Evolution

[0049] Gene shuffling or directed evolution consists of iterations of DNA shuffling followed by appropriate screening and/or selection to generate variants of nucleic acids or portions thereof encoding proteins having a modified biological activity (Castle et al., (2004) Science 304(5674): 1151-4; U.S. Pat. Nos. 5,811,238 and 6,395,547).

### Regulatory Element/Control Sequence/Promoter

[0050] The terms “regulatory element”, “control sequence” and “promoter” are all used interchangeably herein and are to be taken in a broad context to refer to regulatory nucleic acid sequences capable of effecting expression of the sequences to which they are ligated. The term “promoter” typically refers to a nucleic acid control sequence located upstream from the transcriptional start of a gene and which is involved in recognising and binding of RNA polymerase and other proteins, thereby directing transcription of an operably linked nucleic acid. Encompassed by the aforementioned terms are transcriptional regulatory sequences derived from a classical eukaryotic genomic gene (including the TATA box which is required for accurate transcription initiation, with or without a CCAAT box sequence) and additional regulatory elements (i.e. upstream activating sequences, enhancers and silencers) which alter gene expression in response to developmental and/or external stimuli, or in a tissue-specific manner. Also included within the term is a transcriptional regulatory sequence of a classical prokaryotic gene, in which case it may include a −35 box sequence and/or −10 box transcriptional regulatory sequences. The term “regulatory element” also encompasses a synthetic fusion molecule or derivative that confers, activates or enhances expression of a nucleic acid molecule in a cell, tissue or organ.

[0051] A “plant promoter” comprises regulatory elements, which mediate the expression of a coding sequence segment in plant cells. Accordingly, a plant promoter need not be of plant origin, but may originate from viruses or micro-organisms, for example from viruses which attack plant cells. The “plant promoter” can also originate from a plant cell, e.g. from the plant which is transformed with the nucleic acid sequence to be expressed in the inventive process and described herein. This also applies to other “plant” regulatory signals, such as “plant” terminators. The promoters upstream of the nucleotide sequences useful in the methods of the present invention can be modified by one or more nucleotide substitution(s), insertion(s) and/or deletion(s) without interfering with the functionality or activity of either the promoters, the open reading frame (ORF) or the 3′-regulatory region such as terminators or other 3′ regulatory regions which are located away from the ORF. It is furthermore possible that the activity of the promoters is increased by modification of their sequence, or that they are replaced completely by more active promoters, even promoters from heterologous organisms. For expression in plants, the nucleic acid molecule must, as described above, be linked operably to or comprise a suitable promoter which expresses the gene at the right point in time and with the required spatial expression pattern.

[0052] For the identification of functionally equivalent promoters, the promoter strength and/or expression pattern of a candidate promoter may be analysed for example by operably linking the promoter to a reporter gene and assaying the expression level and pattern of the reporter gene in various tissues of the plant. Suitable well-known reporter genes include for example beta-glucuronidase or beta-galactosidase. The promoter activity is assayed by measuring the enzymatic activity of the beta-glucuronidase or beta-galactosidase. The promoter strength and/or expression pattern may then be compared to that of a reference promoter (such as the one used in the methods of the present invention). Alternatively, promoter strength may be assayed by quantifying mRNA levels or by comparing mRNA levels of the nucleic acid used in the methods of the present invention, with mRNA levels of housekeeping genes such as 18S rRNA, using methods known in the art, such as Northern blotting with densitometric analysis of autoradiograms, quantitative real-time PCR or RT-PCR (Heid et al., 1996 Genome Methods 6: 986-994). Generally by “weak promoter” is intended a promoter that drives expression of a coding sequence at a low level. By “low level” is intended at levels of about 1/10,000 transcripts to about 1/100,000 transcripts, to about 1/500,0000 transcripts per cell. Conversely, a “strong promoter” drives expression of a coding sequence at high level, or at about 1/10 transcripts to about 1/100 transcripts to about 1/1000 transcripts per cell.

### Operably Linked

[0053] The term “operably linked” as used herein refers to a functional linkage between the promoter sequence and the gene of interest, such that the promoter sequence is able to initiate transcription of the gene of interest.

### Constitutive Promoter

[0054] A “constitutive promoter” refers to a promoter that is transcriptionally active during most, but not necessarily all, phases of growth and development and under most environmental conditions, in at least one cell, tissue or organ. Table 2a below gives examples of constitutive promoters.

TABLE 2a
Examples of constitutive promoters

| Gene Source | Reference |
|---|---|
| Actin | McElroy et al, Plant Cell, 2: 163-171, 1990 |
| HMGP | WO 2004/070039 |
| CAMV 35S | Odell et al, Nature, 313: 810-812, 1985 |
| CaMV 19S | Nilsson et al., Physiol. Plant. 100: 456-462, 1997 |
| GOS2 | de Pater et al, Plant J November; 2(6): 837-44, 1992, |
| | WO 2004/065596 |
| Ubiquitin | Christensen et al, Plant Mol. Biol. 18: 675-689, 1992 |
| Rice cyclophilin | Buchholz et al, Plant Mol Biol. 25(5): 837-43, 1994 |
| Maize H3 histone | Lepetit et al, Mol. Gen. Genet. 231: 276-285, 1992 |
| Alfalfa H3 | Wu et al. Plant Mol. Biol. 11: 641-649, 1988 |
| histone | |
| Actin 2 | An et al, Plant J. 10(1); 107-121, 1996 |
| 34S FMV | Sanger et al., Plant. Mol. Biol., 14, 1990: 433-443 |
| Rubisco small | U.S. Pat. No. 4,962,028 |
| subunit | |
| OCS | Leisner (1988) Proc Natl Acad Sci USA 85(5): 2553 |
| SAD1 | Jain et al., Crop Science, 39 (6), 1999: 1696 |
| SAD2 | Jain et al., Crop Science, 39 (6), 1999: 1696 |
| nos | Shaw et al. (1984) Nucleic Acids Res. 12(20): |
| | 7831-7846 |
| V-ATPase | WO 01/14572 |
| Super promoter | WO 95/14098 |
| G-box proteins | WO 94/12015 |

### Ubiquitous Promoter

[0055] A ubiquitous promoter is active in substantially all tissues or cells of an organism.

### Developmentally-Regulated Promoter

[0056] A developmentally-regulated promoter is active during certain developmental stages or in parts of the plant that undergo developmental changes.

### Inducible Promoter

[0057] An inducible promoter has induced or increased transcription initiation in response to a chemical (for a review see Gatz 1997, Annu. Rev. Plant Physiol. Plant Mol. Biol., 48:89-108), environmental or physical stimulus, or may be “stress-inducible”, i.e. activated when a plant is exposed to various stress conditions, or a “pathogen-inducible” i.e. activated when a plant is exposed to exposure to various pathogens.

### Organ-Specific/Tissue-Specific Promoter

[0058] An organ-specific or tissue-specific promoter is one that is capable of preferentially initiating transcription in certain organs or tissues, such as the leaves, roots, seed tissue etc. For example, a “root-specific promoter” is a promoter that is transcriptionally active predominantly in plant roots, substantially to the exclusion of any other parts of a plant, whilst still allowing for any leaky expression in these other plant parts. Promoters able to initiate transcription in certain cells only are referred to herein as “cell-specific”.

[0059] Examples of root-specific promoters are listed in Table 2b below:

TABLE 2b
Examples of root-specific promoters

| Gene Source | Reference |
|---|---|
| RCc3 | Plant Mol Biol. 1995 January; 27(2): 237-48 |
| Arabidopsis phosphate | Kovama et al., 2005 |
| transporter PHT1 | |
| Medicago phosphate | Xiao et al., 2006 |
| transporter | |
| Arabidopsis Pyk10 | Nitz et al. (2001) Plant Sci 161(2): 337-346 |

[0060] A seed-specific promoter is transcriptionally active predominantly in seed tissue, but not necessarily exclusively in seed tissue (in cases of leaky expression). The seed-specific promoter may be active during seed development and/or during germination.

[0061] A green tissue-specific promoter as defined herein is a promoter that is transcriptionally active predominantly in green tissue, substantially to the exclusion of any other parts of a plant, whilst still allowing for any leaky expression in these other plant parts.

[0062] Examples of green tissue-specific promoters which may be used to perform the methods of the invention are shown in Table 2c below.

TABLE 2c
Examples of green tissue-specific promoters

| Gene | Expression | Reference |
|---|---|---|
| Maize Orthophosphate dikinase | Leaf specific | Fukavama et al., 2001 |
| Maize Phosphoenolpyruvate | Leaf specific | Kausch et al., 2001 |
| carboxylase | | |
| Rice Phosphoenolpyruvate | Leaf specific | Liu et al., 2003 |
| carboxylase | | |
| Rice small subunit Rubisco | Leaf specific | Nomura et al., 2000 |
| rice beta expansin EXBP9 | Shoot specific | WO 2004/070039 |
| Pigeonpea small subunit Rubisco | Leaf specific | Panguluri et al., 2005 |
| Pea RBCS3A | Leaf specific | |

[0063] Another example of a tissue-specific promoter is a meristem-specific promoter, which is transcriptionally active predominantly in meristematic tissue, substantially to the exclusion of any other parts of a plant, whilst still allowing for any leaky expression in these other plant parts.

### Terminator

[0064] The term “terminator” encompasses a control sequence which is a DNA sequence at the end of a transcriptional unit which signals 3′ processing and polyadenylation of a primary transcript and termination of transcription. The terminator can be derived from the natural gene, from a variety of other plant genes, or from T-DNA. The terminator to be added may be derived from, for example, the nopaline synthase or octopine synthase genes, or alternatively from another plant gene, or less preferably from any other eukaryotic gene.

### Modulation

[0065] The term “modulation” means in relation to expression or gene expression, a process in which the expression level is changed by said gene expression in comparison to the control plant, preferably the expression level is increased. The original, unmodulated expression may be of any kind of expression of a structural RNA (rRNA, tRNA) or mRNA with subsequent translation. The term “modulating the activity” shall mean any change of the expression of the inventive nucleic acid sequences or encoded proteins, which leads to increased yield and/or increased growth of the plants.

### Expression

[0066] The term “expression” or “gene expression” means the transcription of a specific gene or specific genes or specific genetic construct. The term “expression” or “gene expression” in particular means the transcription of a gene or genes or genetic construct into structural RNA (rRNA, tRNA) or mRNA with or without subsequent translation of the latter into a protein. The process includes transcription of DNA and processing of the resulting mRNA product.

### Increased Expression/Overexpression

[0067] The term “increased expression” or “overexpression” as used herein means any form of expression that is additional to the original wild-type expression level.

[0068] Methods for increasing expression of genes or gene products are well documented in the art and include, for example, overexpression driven by appropriate promoters, the use of transcription enhancers or translation enhancers. Isolated nucleic acids which serve as promoter or enhancer elements may be introduced in an appropriate position (typically upstream) of a non-heterologous form of a polynucleotide so as to upregulate expression of a nucleic acid encoding the polypeptide of interest. For example, endogenous promoters may be altered in vivo by mutation, deletion, and/or substitution (see, Kmiec, U.S. Pat. No. 5,565,350; Zarling et al., WO9322443), or isolated promoters may be introduced into a plant cell in the proper orientation and distance from a gene of the present invention so as to control the expression of the gene.

[0069] If polypeptide expression is desired, it is generally desirable to include a polyadenylation region at the 3′-end of a polynucleotide coding region. The polyadenylation region can be derived from the natural gene, from a variety of other plant genes, or from T-DNA. The 3′ end sequence to be added may be derived from, for example, the nopaline synthase or octopine synthase genes, or alternatively from another plant gene, or less preferably from any other eukaryotic gene.

[0070] An intron sequence may also be added to the 5′ untranslated region (UTR) or the coding sequence of the partial coding sequence to increase the amount of the mature message that accumulates in the cytosol. Inclusion of a spliceable intron in the transcription unit in both plant and animal expression constructs has been shown to increase gene expression at both the mRNA and protein levels up to 1000-fold (Buchman and Berg (1988) Mol. Cell biol. 8: 4395-4405; Callis et al. (1987) Genes Dev 1:1183-1200). Such intron enhancement of gene expression is typically greatest when placed near the 5′ end of the transcription unit. Use of the maize introns Adh1-S intron 1, 2, and 6, the Bronze-1 intron are known in the art. For general information see: The Maize Handbook, Chapter 116, Freeling and Walbot, Eds., Springer, N.Y. (1994).

[0071] Optionally, one or more terminator sequences may be used in the construct introduced into a plant. Additional regulatory elements may include transcriptional as well as translational enhancers. Other control sequences (besides promoter, enhancer, silencer, intron sequences, 3′UTR and/or 5′UTR regions) may be protein and/or RNA stabilizing elements. Such sequences would be known or may readily be obtained by a person skilled in the art.

[0072] The genetic constructs of the invention may further include an origin of replication sequence that is required for maintenance and/or replication in a specific cell type. One example is when a genetic construct is required to be maintained in a bacterial cell as an episomal genetic element (e.g. plasmid or cosmid molecule). Preferred origins of replication include, but are not limited to, the f1-ori and colE1.

### Endogenous Gene

[0073] Reference herein to an “endogenous” gene not only refers to the gene in question as found in a plant in its natural form (i.e., without there being any human intervention), but also refers to that same gene (or a substantially homologous nucleic acid/gene) in an isolated form subsequently (re)introduced into a plant (a transgene). For example, a transgenic plant containing such a transgene may encounter a substantial reduction of the transgene expression and/or substantial reduction of expression of the endogenous gene. The isolated gene may be isolated from an organism or may be manmade, for example by chemical synthesis.

### Decreased Expression

[0074] Reference herein to “decreased expression” or “reduction or substantial elimination” of expression is taken to mean a decrease in endogenous gene expression and/or polypeptide levels and/or polypeptide activity relative to control plants. The reduction or substantial elimination is in increasing order of preference at least 10%, 20%, 30%, 40% or 50%, 60%, 70%, 80%, 85%, 90%, or 95%, 96%, 97%, 98%, 99% or more reduced compared to that of control plants. Reduction or substantial elimination of expression may be achieved using routine tools and techniques known in the art.

### Selectable Marker (Gene)/Reporter Gene

[0075] “Selectable marker”, “selectable marker gene” or “reporter gene” includes any gene that confers a phenotype on a cell in which it is expressed to facilitate the identification and/or selection of cells that are transfected or transformed with a nucleic acid construct of the invention. These marker genes enable the identification of a successful transfer of the nucleic acid molecules via a series of different principles. Suitable markers may be selected from markers that confer antibiotic or herbicide resistance, that introduce a new metabolic trait or that allow visual selection. Examples of selectable marker genes include genes conferring resistance to antibiotics (such as nptII that phosphorylates neomycin and kanamycin, or hpt, phosphorylating hygromycin, or genes conferring resistance to, for example, bleomycin, streptomycin, tetracyclin, chloramphenicol, ampicillin, gentamycin, geneticin (G418), spectinomycin or blasticidin), to herbicides (for example bar which provides resistance to Basta®; aroA or gox providing resistance against glyphosate, or the genes conferring resistance to, for example, imidazolinone, phosphinothricin or sulfonylurea), or genes that provide a metabolic trait (such as manA that allows plants to use mannose as sole carbon source or xylose isomerase for the utilisation of xylose, or antinutritive markers such as the resistance to 2-deoxyglucose). Expression of visual marker genes results in the formation of colour (for example β-glucuronidase, GUS or β-galactosidase with its coloured substrates, for example X-Gal), luminescence (such as the luciferin/luceferase system) or fluorescence (Green Fluorescent Protein, GFP, and derivatives thereof). This list represents only a small number of possible markers. The skilled worker is familiar with such markers. Different markers are preferred, depending on the organism and the selection method.

[0076] It is known that upon stable or transient integration of nucleic acids into plant cells, only a minority of the cells takes up the foreign DNA and, if desired, integrates it into its genome, depending on the expression vector used and the transfection technique used. To identify and select these integrants, a gene coding for a selectable marker (such as the ones described above) is usually introduced into the host cells together with the gene of interest. These markers can for example be used in mutants in which these genes are not functional by, for example, deletion by conventional methods. Furthermore, nucleic acid molecules encoding a selectable marker can be introduced into a host cell on the same vector that comprises the sequence encoding the polypeptides of the invention or used in the methods of the invention, or else in a separate vector. Cells which have been stably transfected with the introduced nucleic acid can be identified for example by selection (for example, cells which have integrated the selectable marker survive whereas the other cells die).

[0077] Since the marker genes, particularly genes for resistance to antibiotics and herbicides, are no longer required or are undesired in the transgenic host cell once the nucleic acids have been introduced successfully, the process according to the invention for introducing the nucleic acids advantageously employs techniques which enable the removal or excision of these marker genes. One such a method is what is known as co-transformation. The co-transformation method employs two vectors simultaneously for the transformation, one vector bearing the nucleic acid according to the invention and a second bearing the marker gene(s). A large proportion of transformants receives or, in the case of plants, comprises (up to 40% or more of the transformants), both vectors. In case of transformation with Agrobacteria, the transformants usually receive only a part of the vector, i.e. the sequence flanked by the T-DNA, which usually represents the expression cassette. The marker genes can subsequently be removed from the transformed plant by performing crosses. In another method, marker genes integrated into a transposon are used for the transformation together with desired nucleic acid (known as the Ac/Ds technology). The transformants can be crossed with a transposase source or the transformants are transformed with a nucleic acid construct conferring expression of a transposase, transiently or stable. In some cases (approx. 10%), the transposon jumps out of the genome of the host cell once transformation has taken place successfully and is lost. In a further number of cases, the transposon jumps to a different location. In these cases the marker gene must be eliminated by performing crosses. In microbiology, techniques were developed which make possible, or facilitate, the detection of such events. A further advantageous method relies on what is known as recombination systems; whose advantage is that elimination by crossing can be dispensed with. The best-known system of this type is what is known as the Cre/lox system. Cre1 is a recombinase that removes the sequences located between the loxP sequences. If the marker gene is integrated between the loxP sequences, it is removed once transformation has taken place successfully, by expression of the recombinase. Further recombination systems are the HIN/HIX, FLP/FRT and REP/STB system (Tribble et al., J. Biol. Chem., 275, 2000: 22255-22267; Velmurugan et al., J. Cell Biol., 149, 2000: 553-566). A site-specific integration into the plant genome of the nucleic acid sequences according to the invention is possible. Naturally, these methods can also be applied to microorganisms such as yeast, fungi or bacteria.

### Transgenic/Transgene/Recombinant

[0078] For the purposes of the invention, “transgenic”, “transgene” or “recombinant” means with regard to, for example, a nucleic acid sequence, an expression cassette, gene construct or a vector comprising the nucleic acid sequence or an organism transformed with the nucleic acid sequences, expression cassettes or vectors according to the invention, all those constructions brought about by recombinant methods in which either

(a) the nucleic acid sequences encoding proteins useful in the methods of the invention, or
(b) genetic control sequence(s) which is operably linked with the nucleic acid sequence according to the invention, for example a promoter, or
(c) a) and b)
are not located in their natural genetic environment or have been modified by recombinant methods, it being possible for the modification to take the form of, for example, a substitution, addition, deletion, inversion or insertion of one or more nucleotide residues. The natural genetic environment is understood as meaning the natural genomic or chromosomal locus in the original plant or the presence in a genomic library. In the case of a genomic library, the natural genetic environment of the nucleic acid sequence is preferably retained, at least in part. The environment flanks the nucleic acid sequence at least on one side and has a sequence length of at least 50 bp, preferably at least 500 bp, especially preferably at least 1000 bp, most preferably at least 5000 bp. A naturally occurring expression cassette—for example the naturally occurring combination of the natural promoter of the nucleic acid sequences with the corresponding nucleic acid sequence encoding a polypeptide useful in the methods of the present invention, as defined above—becomes a transgenic expression cassette when this expression cassette is modified by non-natural, synthetic (“artificial”) methods such as, for example, mutagenic treatment. Suitable methods are described, for example, in U.S. Pat. No. 5,565,350 or WO 00/15815.

[0079] A transgenic plant for the purposes of the invention is thus understood as meaning, as above, that the nucleic acids used in the method of the invention are not at their natural locus in the genome of said plant, it being possible for the nucleic acids to be expressed homologously or heterologously. However, as mentioned, transgenic also means that, while the nucleic acids according to the invention or used in the inventive method are at their natural position in the genome of a plant, the sequence has been modified with regard to the natural sequence, and/or that the regulatory sequences of the natural sequences have been modified. Transgenic is preferably understood as meaning the expression of the nucleic acids according to the invention at an unnatural locus in the genome, i.e. homologous or, preferably, heterologous expression of the nucleic acids takes place. Preferred transgenic plants are mentioned herein.

### Transformation

[0080] The term “introduction” or “transformation” as referred to herein encompasses the transfer of an exogenous polynucleotide into a host cell, irrespective of the method used for transfer. Plant tissue capable of subsequent clonal propagation, whether by organogenesis or embryogenesis, may be transformed with a genetic construct of the present invention and a whole plant regenerated there from. The particular tissue chosen will vary depending on the clonal propagation systems available for, and best suited to, the particular species being transformed. Exemplary tissue targets include leaf disks, pollen, embryos, cotyledons, hypocotyls, megagametophytes, callus tissue, existing meristematic tissue (e.g., apical meristem, axillary buds, and root meristems), and induced meristem tissue (e.g., cotyledon meristem and hypocotyl meristem). The polynucleotide may be transiently or stably introduced into a host cell and may be maintained non-integrated, for example, as a plasmid. Alternatively, it may be integrated into the host genome. The resulting transformed plant cell may then be used to regenerate a transformed plant in a manner known to persons skilled in the art.

[0081] The transfer of foreign genes into the genome of a plant is called transformation. Transformation of plant species is now a fairly routine technique. Advantageously, any of several transformation methods may be used to introduce the gene of interest into a suitable ancestor cell. The methods described for the transformation and regeneration of plants from plant tissues or plant cells may be utilized for transient or for stable transformation. Transformation methods include the use of liposomes, electroporation, chemicals that increase free DNA uptake, injection of the DNA directly into the plant, particle gun bombardment, transformation using viruses or pollen and microprojection. Methods may be selected from the calcium/polyethylene glycol method for protoplasts (Krens, F. A. et al., (1982) Nature 296, 72-74; Negrutiu I et al. (1987) Plant Mol Biol 8: 363-373); electroporation of protoplasts (Shillito R. D. et al. (1985) Bio/Technol 3, 1099-1102); microinjection into plant material (Crossway A et al., (1986) Mol. Gen Genet 202: 179-185); DNA or RNA-coated particle bombardment (Klein T M et al., (1987) Nature 327: 70) infection with (non-integrative) viruses and the like. Transgenic plants, including transgenic crop plants, are preferably produced via Agrobacterium-mediated transformation. An advantageous transformation method is the transformation in planta. To this end, it is possible, for example, to allow the agrobacteria to act on plant seeds or to inoculate the plant meristem with agrobacteria. It has proved particularly expedient in accordance with the invention to allow a suspension of transformed agrobacteria to act on the intact plant or at least on the flower primordia. The plant is subsequently grown on until the seeds of the treated plant are obtained (Clough and Bent, Plant J. (1998) 16, 735-743). Methods for Agrobacterium-mediated transformation of rice include well known methods for rice transformation, such as those described in any of the following: European patent application EP 1198985 A1, Aldemita and Hodges (Planta 199: 612-617, 1996); Chan et al. (Plant Mol Biol 22 (3): 491-506, 1993), Hiei et al. (Plant J 6 (2): 271-282, 1994), which disclosures are incorporated by reference herein as if fully set forth. In the case of corn transformation, the preferred method is as described in either Ishida et al. (Nat. Biotechnol 14(6): 745-50, 1996) or Frame et al. (Plant Physiol 129(1): 13-22, 2002), which disclosures are incorporated by reference herein as if fully set forth. Said methods are further described by way of example in B. Jenes et al., Techniques for Gene Transfer, in: Transgenic Plants, Vol. 1, Engineering and Utilization, eds. S. D. Kung and R. Wu, Academic Press (1993) 128-143 and in Potrykus Annu. Rev. Plant Physiol. Plant Molec. Biol. 42 (1991) 205-225). The nucleic acids or the construct to be expressed is preferably cloned into a vector, which is suitable for transforming Agrobacterium tumefaciens, for example pBin19 (Bevan et al., Nucl. Acids Res. 12 (1984) 8711). Agrobacteria transformed by such a vector can then be used in known manner for the transformation of plants, such as plants used as a model, like Arabidopsis (Arabidopsis thaliana is within the scope of the present invention not considered as a crop plant), or crop plants such as, by way of example, tobacco plants, for example by immersing bruised leaves or chopped leaves in an agrobacterial solution and then culturing them in suitable media. The transformation of plants by means of Agrobacterium tumefaciens is described, for example, by Hofgen and Willmitzer in Nucl. Acid Res. (1988) 16, 9877 or is known inter alia from F. F. White, Vectors for Gene Transfer in Higher Plants; in Transgenic Plants, Vol. 1, Engineering and Utilization, eds. S. D. Kung and R. Wu, Academic Press, 1993, pp. 15-38.

[0082] In addition to the transformation of somatic cells, which then have to be regenerated into intact plants, it is also possible to transform the cells of plant meristems and in particular those cells which develop into gametes. In this case, the transformed gametes follow the natural plant development, giving rise to transgenic plants. Thus, for example, seeds of Arabidopsis are treated with agrobacteria and seeds are obtained from the developing plants of which a certain proportion is transformed and thus transgenic [Feldman, K A and Marks M D (1987). Mol Gen Genet 208:274-289; Feldmann K (1992). In: C Koncz, N-H Chua and J Shell, eds, Methods in Arabidopsis Research. Word Scientific, Singapore, pp. 274-289]. Alternative methods are based on the repeated removal of the inflorescences and incubation of the excision site in the center of the rosette with transformed agrobacteria, whereby transformed seeds can likewise be obtained at a later point in time (Chang (1994). Plant J. 5: 551-558; Katavic (1994). Mol Gen Genet, 245: 363-370). However, an especially effective method is the vacuum infiltration method with its modifications such as the “floral dip” method. In the case of vacuum infiltration of Arabidopsis, intact plants under reduced pressure are treated with an agrobacterial suspension [Bechthold, N (1993). C R Acad Sci Paris Life Sci, 316: 1194-1199], while in the case of the “floral dip” method the developing floral tissue is incubated briefly with a surfactant-treated agrobacterial suspension [Clough, S J and Bent A F (1998) The Plant J. 16, 735-743]. A certain proportion of transgenic seeds are harvested in both cases, and these seeds can be distinguished from non-transgenic seeds by growing under the above-described selective conditions. In addition the stable transformation of plastids is of advantages because plastids are inherited maternally is most crops reducing or eliminating the risk of transgene flow through pollen. The transformation of the chloroplast genome is generally achieved by a process which has been schematically displayed in Klaus et al., 2004 [Nature Biotechnology 22 (2), 225-229]. Briefly the sequences to be transformed are cloned together with a selectable marker gene between flanking sequences homologous to the chloroplast genome. These homologous flanking sequences direct site specific integration into the plastome. Plastidal transformation has been described for many different plant species and an overview is given in Bock (2001) Transgenic plastids in basic research and plant biotechnology. J Mol Biol. 2001 Sep. 21; 312 (3):425-38 or Maliga, P (2003) Progress towards commercialization of plastid transformation technology. Trends Biotechnol. 21, 20-28. Further biotechnological progress has recently been reported in form of marker free plastid transformants, which can be produced by a transient co-integrated maker gene (Klaus et al., 2004, Nature Biotechnology 22(2), 225-229).

### T-DNA Activation Taming

[0083] T-DNA activation tagging (Hayashi et al. Science (1992) 1350-1353), involves insertion of T-DNA, usually containing a promoter (may also be a translation enhancer or an intron), in the genomic region of the gene of interest or 10 kb up- or downstream of the coding region of a gene in a configuration such that the promoter directs expression of the targeted gene. Typically, regulation of expression of the targeted gene by its natural promoter is disrupted and the gene falls under the control of the newly introduced promoter. The promoter is typically embedded in a T-DNA. This T-DNA is randomly inserted into the plant genome, for example, through Agrobacterium infection and leads to modified expression of genes near the inserted T-DNA. The resulting transgenic plants show dominant phenotypes due to modified expression of genes close to the introduced promoter.

### TILLING

[0084] The term “TILLING” is an abbreviation of “Targeted Induced Local Lesions In Genomes” and refers to a mutagenesis technology useful to generate and/or identify nucleic acids encoding proteins with modified expression and/or activity. TILLING also allows selection of plants carrying such mutant variants. These mutant variants may exhibit modified expression, either in strength or in location or in timing (if the mutations affect the promoter for example). These mutant variants may exhibit higher activity than that exhibited by the gene in its natural form. TILLING combines high-density mutagenesis with high-throughput screening methods. The steps typically followed in TILLING are: (a) EMS mutagenesis (Redei G P and Koncz C (1992) In Methods in Arabidopsis Research, Koncz C, Chua N H, Schell J, eds. Singapore, World Scientific Publishing Co, pp. 16-82; Feldmann et al., (1994) In Meyerowitz E M, Somerville C R, eds, Arabidopsis. Cold Spring Harbor Laboratory Press, Cold Spring Harbor, N.Y., pp 137-172; Lightner J and Caspar T (1998) In J Martinez-Zapater, J Salinas, eds, Methods on Molecular Biology, Vol. 82. Humana Press, Totowa, N.J., pp 91-104); (b) DNA preparation and pooling of individuals; (c) PCR amplification of a region of interest; (d) denaturation and annealing to allow formation of heteroduplexes; (e) DHPLC, where the presence of a heteroduplex in a pool is detected as an extra peak in the chromatogram; (f) identification of the mutant individual; and (g) sequencing of the mutant PCR product. Methods for TILLING are well known in the art (McCallum et al., (2000) Nat Biotechnol 18: 455-457; reviewed by Stemple (2004) Nat Rev Genet 5(2): 145-50).

### Homologous Recombination

[0085] Homologous recombination allows introduction in a genome of a selected nucleic acid at a defined selected position. Homologous recombination is a standard technology used routinely in biological sciences for lower organisms such as yeast or the moss Physcomitrella. Methods for performing homologous recombination in plants have been described not only for model plants (Offringa et al. (1990) EMBO J 9(10): 3077-84) but also for crop plants, for example rice (Terada et al. (2002) Nat Biotech 20(10): 1030-4; lida and Terada (2004) Curr Opin Biotech 15(2): 132-8).

### Yield

[0086] The term “yield” in general means a measurable produce of economic value, typically related to a specified crop, to an area, and to a period of time. Individual plant parts directly contribute to yield based on their number, size and/or weight, or the actual yield is the yield per acre for a crop and year, which is determined by dividing total production (includes both harvested and appraised production) by planted acres. The term “yield” of a plant may relate to vegetative biomass (root and/or shoot biomass), to reproductive organs, and/or to propagules (such as seeds) of that plant.

[0087] Taking corn as an example, a yield increase may be manifested as one or more of the following: increase in the number of plants established per hectare or acre, an increase in the number of ears per plant, an increase in the number of rows, number of kernels per row, kernel weight, thousand kernel weight, ear length/diameter, increase in the seed filling rate (which is the number of filled seeds divided by the total number of seeds and multiplied by 100), among others. Taking rice as an example, a yield increase may manifest itself as an increase in one or more of the following: number of plants per hectare or acre, number of panicles per plant, number of spikelets per panicle, number of flowers (florets) per panicle (which is expressed as a ratio of the number of filled seeds over the number of primary panicles), increase in the seed filling rate (which is the number of filled seeds divided by the total number of seeds and multiplied by 100), increase in thousand kernel weight, among others.

### Early Vigour

[0088] “Early vigour” refers to active healthy well-balanced growth especially during early stages of plant growth, and may result from increased plant fitness due to, for example, the plants being better adapted to their environment (i.e. optimizing the use of energy resources and partitioning between shoot and root). Plants having early vigour also show increased seedling survival and a better establishment of the crop, which often results in highly uniform fields (with the crop growing in uniform manner, i.e. with the majority of plants reaching the various stages of development at substantially the same time), and often better and higher yield. Therefore, early vigour may be determined by measuring various factors, such as thousand kernel weight, percentage germination, percentage emergence, seedling growth, seedling height, root length, root and shoot biomass and many more.

### Increase/Improve/Enhance

[0089] The terms “increase”, “improve” or “enhance” are interchangeable and shall mean in the sense of the application at least a 3%, 4%, 5%, 6%, 7%, 8%, 9% or 10%, preferably at least 15% or 20%, more preferably 25%, 30%, 35% or 40% more yield and/or growth in comparison to control plants as defined herein.

### Greenness Index

[0090] The “greenness index” as used herein is calculated from digital images of plants. For each pixel belonging to the plant object on the image, the ratio of the green value versus the red value (in the RGB model for encoding color) is calculated. The greenness index is expressed as the percentage of pixels for which the green-to-red ratio exceeds a given threshold. Under normal growth conditions, under salt stress growth conditions, and under reduced nutrient availability growth conditions, the greenness index of plants is measured in the last imaging before flowering. In contrast, under drought stress growth conditions, the greenness index of plants is measured in the first imaging after drought.

### Seed Yield

[0091] Increased seed yield may manifest itself as one or more of the following: a) an increase in seed biomass (total seed weight) which may be on an individual seed basis and/or per plant and/or per hectare or acre; b) increased number of flowers per plant; c) increased number of (filled) seeds; d) increased seed filling rate (which is expressed as the ratio between the number of filled seeds divided by the total number of seeds; e) increased harvest index, which is expressed as a ratio of the yield of harvestable parts, such as seeds, divided by the total biomass; and f) increased thousand kernel weight (TKW), which is extrapolated from the number of filled seeds counted and their total weight. An increased TKW may result from an increased seed size and/or seed weight, and may also result from an increase in embryo and/or endosperm size.

[0092] An increase in seed yield may also be manifested as an increase in seed size and/or seed volume. Furthermore, an increase in seed yield may also manifest itself as an increase in seed area and/or seed length and/or seed width and/or seed perimeter. Increased yield may also result in modified architecture, or may occur because of modified architecture.

### Increased Growth Rate

[0093] Since the transgenic plants according to the present invention have increased yield, it is likely that these plants exhibit an increased growth rate (during at least part of their life cycle), relative to the growth rate of corresponding wild type plants at a corresponding stage in their life cycle. Besides the increased yield capacity, an increased efficiency of nutrient uptake may also contribute to the increase in yield. It is observed that the plants according to the present invention show a higher efficiency in nutrient uptake. Increased efficiency of nutrient uptake allows better growth of the plant, whether the plant is under stress or non-stress conditions.

[0094] The increased growth rate may be specific to one or more parts of a plant (including seeds), or may be throughout substantially the whole plant. A plant having an increased growth rate may even exhibit early flowering. The increase in growth rate may take place at one or more stages in the life cycle of a plant or during substantially the whole plant life cycle. Increased growth rate during the early stages in the life cycle of a plant may reflect enhanced vigour (increased seedling vigor at emergence). The increase in growth rate may alter the harvest cycle of a plant allowing plants to be sown later and/or harvested sooner than would otherwise be possible. If the growth rate is sufficiently increased, it may allow for the further sowing of seeds of the same plant species (for example sowing and harvesting of rice plants followed by sowing and harvesting of further rice plants all within one conventional growing period). Similarly, if the growth rate is sufficiently increased, it may allow for the further sowing of seeds of different plants species (for example the sowing and harvesting of rice plants followed by, for example, the sowing and optional harvesting of soy bean, potato or any other suitable plant). Harvesting additional times from the same rootstock in the case of some crop plants may also be possible. Altering the harvest cycle of a plant may lead to an increase in annual biomass production per acre (due to an increase in the number of times (say in a year) that any particular plant may be grown and harvested). An increase in growth rate may also allow for the cultivation of transgenic plants in a wider geographical area than their wild-type counterparts, since the territorial limitations for growing a crop are often determined by adverse environmental conditions either at the time of planting (early season) or at the time of harvesting (late season). Such adverse conditions may be avoided if the harvest cycle is shortened. The growth rate may be determined by deriving various parameters from growth curves, such parameters may be: T-Mid (the time taken for plants to reach 50% of their maximal size) and T-90 (time taken for plants to reach 90% of their maximal size), amongst others.

[0095] An increase in yield and/or growth rate occurs whether the plant is under non-stress conditions or whether the plant is exposed to various stresses compared to control plants. Plants typically respond to exposure to stress by growing more slowly. In conditions of severe stress, the plant may even stop growing altogether. Mild stress on the other hand is defined herein as being any stress to which a plant is exposed which does not result in the plant ceasing to grow altogether without the capacity to resume growth. Mild stress in the sense of the invention leads to a reduction in the growth of the stressed plants of less than 40%, 35% or 30%, preferably less than 25%, 20% or 15%, more preferably less than 14%, 13%, 12%, 11% or 10% or less in comparison to the control plant under non-stress conditions. Due to advances in agricultural practices (irrigation, fertilization, pesticide treatments) severe stresses are not often encountered in cultivated crop plants. As a consequence, the compromised growth induced by mild stress is often an undesirable feature for agriculture. Mild stresses are the everyday biotic and/or abiotic (environmental) stresses to which a plant is exposed. Abiotic stresses may be due to drought or excess water, anaerobic stress, salt stress, chemical toxicity, oxidative stress and hot, cold or freezing temperatures. The abiotic stress may be an osmotic stress caused by a water stress (particularly due to drought), salt stress, oxidative stress or an ionic stress. Biotic stresses are typically those stresses caused by pathogens, such as bacteria, viruses, fungi and insects.

[0096] In particular, the methods of the present invention may be performed under non-stress conditions to give plants having increased yield relative to control plants. As reported in Wang et al. (Planta (2003) 218: 1-14), abiotic stress leads to a series of morphological, physiological, biochemical and molecular changes that adversely affect plant growth and productivity. Drought, salinity, extreme temperatures and oxidative stress are known to be interconnected and may induce growth and cellular damage through similar mechanisms. Rabbani et al. (Plant Physiol (2003) 133: 1755-1767) describes a particularly high degree of “cross talk” between drought stress and high-salinity stress. For example, drought and/or salinisation are manifested primarily as osmotic stress, resulting in the disruption of homeostasis and ion distribution in the cell. Oxidative stress, which frequently accompanies high or low temperature, salinity or drought stress may cause denaturing of functional and structural proteins. As a consequence, these diverse environmental stresses often activate similar cell signaling pathways and cellular responses, such as the production of stress proteins, up-regulation of anti-oxidants, accumulation of compatible solutes and growth arrest. The term “non-stress” conditions as used herein are those environmental conditions that allow optimal growth of plants. Persons skilled in the art are aware of normal soil conditions and climatic conditions for a given location.

### Plant

[0097] The term “plant” as used herein encompasses whole plants, ancestors and progeny of the plants and plant parts, including seeds, shoots, stems, leaves, roots (including tubers), flowers, and tissues and organs, wherein each of the aforementioned comprise the gene/nucleic acid of interest. The term “plant” also encompasses plant cells, suspension cultures, callus tissue, embryos, meristematic regions, gametophytes, sporophytes, pollen and microspores, again wherein each of the aforementioned comprises the gene/nucleic acid of interest.

[0098] Plants that are particularly useful in the methods of the invention include all plants which belong to the superfamily Viridiplantae, in particular monocotyledonous and dicotyledonous plants including fodder or forage legumes, ornamental plants, food crops, trees or shrubs selected from the list comprising Acacia spp., Acer spp., Actinidia spp., Aesculus spp., Agathis australis, Albizia amara, Alsophila tricolor, Andropogon spp., Arachis spp, Areca catechu, Astelia fragrans, Astragalus cicer, Abelmoschus spp., Agave sisalana, Agropyron spp., Agrostis stolonifera, Allium spp., Amaranthus spp., Ammophila arenaria, Ananas comosus, Annona spp., Apium graveolens, Artocarpus spp., Asparagus officinalis, Avena spp. (e.g. Avena sativa, Avena fatua, Avena byzantina, Avena fatua var. sativa, Avena hybrida), Averrhoa carambola Baikiaea plurijuga, Betula spp., Bruguiera gymnorrhiza, Burkea africana, Butea frondosa, Bambusa sp., Benincasa hispida, Bertholletia excelsea, Beta vulgaris, Brassica spp. (e.g. Brassica napus, Brassica rapa ssp. [canola, oilseed rape, turnip rape]), Cadaba farinosa, Caffiandra spp, Camellia sinensis, Canna indica, Capsicum spp., Cassia spp., Centroema pubescens, Chaenomeles spp., Cinnamomum cassia, Coffea arabica, Colophospermum mopane, Coronillia varia, Cotoneaster serotina, Crataegus spp., Cucumis spp., Cupressus spp., Cyathea dealbata, Cydonia oblonga, Cryptomeria japonica, Cymbopogon spp., Cynthea dealbata, Cydonia oblonga, Cadaba farinosa, Camellia sinensis, Cannabis sativa, Capsicum spp., Carex elata, Carica papaya, Carissa macrocarpa, Carya spp., Carthamus tinctorius, Castanea spp., Ceiba pentandra, Cichorium endivia, Cinnamomum spp., Citrullus lanatus, Citrus spp., Cocos spp., Coffea spp., Colocasia esculenta, Cola spp., Corchorus sp., Coriandrum sativum, Corylus spp., Crataegus spp., Crocus sativus, Cucurbita spp., Cynara spp., Dalbergia monetaria, Davallia divaricata, Desmodium spp., Dicksonia squarosa, Diheteropogon amplectens, Dioclea spp, Dolichos spp., Dorycnium rectum, Daucus carota, Dimocarpus longan, Dioscorea spp., Diospyros spp., Echinochloa pyramidalis, Ehrartia spp., Eleusine coracana, Eragrestis spp., Erythrina spp., Eucalyptus spp., Euclea schimperi, Eulalia villosa, Elaeis (e.g. Elaeis guineensis, Elaeis oleifera), Erianthus sp., Eriobotrya japonica, Eugenia uniflora, Fagopyrum spp., Feijoa sellowiana, Fragaria spp., Flemingia spp, Freycinetia banksii, Fagus spp., Festuca arundinacea, Ficus carica, Fortunella spp., Fragaria spp., Geranium thunbergii, Ginkgo biloba, Glycine spp. (e.g. Glycine max, Soja hispida or Soja max), Glycine javanica, Gliricidia spp, Gossypium hirsutum, Grevillea spp., Guibourtia coleosperma, Gossypium hirsutum, Helianthus spp. (e.g. Helianthus annuus), Hemerocallis fulva, Hedysarum spp., Hemarthia altissima, Heteropogon contortus, Hibiscus spp., Hordeum spp. (e.g. Hordeum vulgare), Hyparrhenia rufa, Hypericum erectum, Hyperthelia dissoluta, Indigo incarnata, Iris spp., Ipomoea batatas, Juglans spp., Leptarrhena pyrolifolia, Lespediza spp., Lettuca spp., Leucaena leucocephala, Loudetia simplex, Lotonus bainesii, Lotus spp., Lactuca sativa, Lathyrus spp., Lens culinaris, Linum usitatissimum, Litchi chinensis, Luffa acutangula, Lupinus spp., Luzula sylvatica, Lycopersicon spp. (e.g. Lycopersicon esculentum, Lycopersicon lycopersicum, Lycopersicon pyriforme), Macrotyloma spp., Macrotyloma axillare, Malus spp., Malus spp., Malpighia emarginata, Mammea americana, Mangifera indica, Manihot spp., Manihot esculenta, Medicago sativa, Metasequoia glyptostroboides, Manilkara zapota, Medicago sativa, Melilotus spp., Mentha spp., Miscanthus sinensis, Momordica spp., Morus nigra, Musa spp., Musa sapientum, Nicotianum spp., Onobrychis spp., Ornithopus spp., Peltophorum africanum, Pennisetum spp., Olea spp., Opuntia spp., Oryza spp. (e.g. Oryza sativa, Oryza latifolia), Panicum miliaceum, Panicum virgatum, Passiflora edulis, Pastinaca sativa, Pennisetum sp., Persea spp., Persea gratissima, Petunia spp., Phaseolus spp., Phoenix canariensis, Phormium cookianum, Photinia spp., Picea glauca, Pinus spp., Pisum sativum, Podocarpus totara, Pogonarthria fleckii, Pogonarthria squarrosa, Petroselinum crispum, Phalaris arundinacea, Phaseolus spp., Phleum pratense, Phoenix spp., Phragmites australis, Physalis spp., Pinus spp., Pistacia vera, Pisum spp., Poa spp., Populus spp., Prosopis spp., Prosopis cineraria, Prunus spp., Psidium spp., Punica granatum, Pyrus communis, Pseudotsuga menziesii, Pterolobium stellatum, Pyrus communis, Quercus spp., Rhaphiolepsis umbellata, Rhopalostylis sapida, Rhus natalensis, Ribes grossularia, Ribes spp., Robinia pseudoacacia, Rosa spp., Raphanus sativus, Rheum rhabarbarum, Ricinus communis, Rubus spp., Salix spp., Schyzachyrium sanguineum, Sciadopitys verticillata, Sequoia sempervirens, Sequoiadendron giganteum, Saccharum spp., Sambucus spp., Secale cereale, Sesamum spp., Sinapis sp., Solanum spp. (e.g. Solanum tuberosum, Solanum integrifolium or Solanum lycopersicum), Sorghum bicolor, Spinacia spp., Sporobolus fimbriatus, Stiburus alopecuroides, Stylosanthos humilis, Syzygium spp., Tadehagi spp, Taxodium distichum, Themeda triandra, Trifolium spp., Triticum spp. (e.g. Triticum aestivum, Triticum durum, Triticum turgidum, Triticum hybernum, Triticum macha, Triticum sativum or Triticum vulgare), Tagetes spp., Tamarindus indica, Theobroma cacao, Triticosecale rimpaui, Tsuga heterophylla, Tropaeolum minus, Tropaeolum majus, Vaccinium spp., Vicia spp., Vitis vinifera, Vigna spp., Viola odorata, Vitis spp., Watsonia pyramidata, Zantedeschia aethiopica, Zea mays, Zizania palustris, Ziziphus spp., amaranth, artichoke, asparagus, broccoli, Brussels sprouts, cabbage, canola, carrot, cauliflower, celery, collard greens, flax, kale, lentil, oilseed rape, okra, onion, potato, rice, soybean, strawberry, sugar beet, sugarcane, sunflower, tomato, squash, tea and algae, amongst others.

### Alignment of Sequences

[0099] Methods for the alignment of sequences for comparison are well known in the art, such methods include GAP, BESTFIT, BLAST, FASTA and TFASTA. GAP uses the algorithm of Needleman and Wunsch ((1970) J Mol Biol 48: 443-453) to find the global (over the whole the sequence) alignment of two sequences that maximizes the number of matches and minimizes the number of gaps. The BLAST algorithm (Altschul et al. (1990) J Mol Biol 215: 403-10) calculates percent sequence identity and performs a statistical analysis of the similarity between the two sequences. The software for performing BLAST analysis is publicly available through the National Centre for Biotechnology Information (NCBI). Homologues may readily be identified using, for example, the ClustalW multiple sequence alignment algorithm (version 1.83), with the default pairwise alignment parameters, and a scoring method in percentage. Global percentages of similarity and identity may also be determined using one of the methods available in the MatGAT software package (Campanella et al., BMC Bioinformatics. 2003 Jul. 10; 4:29. MatGAT: an application that generates similarity/identity matrices using protein or DNA sequences). Minor manual editing may be performed to optimise alignment between conserved motifs, as would be apparent to a person skilled in the art. Furthermore, instead of using full-length sequences for the identification of homologues, specific domains may also be used. The sequence identity values, which are indicated below in Example 3 as a percentage were determined over the entire nucleic acid or amino acid sequence, and/or over selected domains or conserved motif(s), using the programs mentioned above using the default parameters.

### Reciprocal Blast Search

[0100] Reciprocal blast search typically involves a first BLAST involving BLASTing a query sequence (for example using any of the sequences listed in Table 1, Table 2, Table 14 of Example 9 or Table 18 of Example 18) against any sequence database, such as the publicly available NCBI database. BLASTN or TBLASTX (using standard default values) are generally used when starting from a nucleotide sequence, and BLASTP or TBLASTN (using standard default values) when starting from a protein sequence. The BLAST results may optionally be filtered. The full-length sequences of either the filtered results or non-filtered results are then BLASTed back (second BLAST) against sequences from the organism from which the query sequence is derived (where the query sequence is any of SEQ ID NO: 1 or SEQ ID NO: 2, or SEQ ID NO: 50 to SEQ ID NO: 59, or SEQ ID NO: 131 or SEQ ID NO: 132 or SEQ ID NO: 257 or SEQ ID NO: 258, the second BLAST would therefore be against Oryza sativa sequences). The results of the first and second BLASTs are then compared. A paralogue is identified if a high-ranking hit from the first blast is from the same species as from which the query sequence is derived, a BLAST back then ideally results in the query sequence as highest hit; an orthologue is identified if a high-ranking hit in the first BLAST is not from the same species as from which the query sequence is derived, and preferably results upon BLAST back in the query sequence being among the highest hits.

[0101] High-ranking hits are those having a low E-value. The lower the E-value, the more significant the score (or in other words the lower the chance that the hit was found by chance). Computation of the E-value is well known in the art. In addition to E-values, comparisons are also scored by percentage identity. Percentage identity refers to the number of identical nucleotides (or amino acids) between the two compared nucleic acid (or polypeptide) sequences over a particular length. In the case of large families, ClustalW may be used, followed by a neighbour joining tree, to help visualize clustering of related genes and to identify orthologues and paralogues.

### Amplification

[0102] A variety of nucleic acid amplification-based methods for genetic and physical mapping may be carried out using the nucleic acids. Examples include allele-specific amplification (Kazazian (1989) J. Lab. Clin. Med 11:95-96), polymorphism of PCR-amplified fragments (CAPS; Sheffield et al. (1993) Genomics 16:325-332), allele-specific ligation (Landegren et al. (1988) Science 241:1077-1080), nucleotide extension reactions (Sokolov (1990) Nucleic Acid Res. 18:3671), Radiation Hybrid Mapping (Walter et al. (1997) Nat. Genet. 7:22-28) and Happy Mapping (Dear and Cook (1989) Nucleic Acid Res. 17:6795-6807). For these methods, the sequence of a nucleic acid is used to design and produce primer pairs for use in the amplification reaction or in primer extension reactions. The design of such primers is well known to those skilled in the art. In methods employing PCR-based genetic mapping, it may be necessary to identify DNA sequence differences between the parents of the mapping cross in the region corresponding to the instant nucleic acid sequence. This, however, is generally not necessary for mapping methods.

### DETAILED DESCRIPTION OF THE INVENTION

[0103] The present invention provides a method for enhancing yield-related traits in plants relative to control plants, comprising modulating expression in a plant of a nucleic acid encoding a NAC transcription factor. A preferred method for modulating (preferably, increasing) expression of a nucleic acid encoding a NAC transcription factor is by introducing and expressing in a plant a nucleic acid encoding a particular class of NAC transcription factor as further defined below.

[0104] In addition, the present invention provides a method for enhancing yield-related traits in plants relative to control plants, comprising modulating expression in a plant of a nucleic acid encoding an AP2-2 polypeptide. The present invention further provides a method for enhancing yield-related traits in plants relative to control plants, comprising modulating expression in a plant of a nucleic acid encoding an AP2-70-like polypeptide.

[0105] With regard to a NAC transcription factor, the nucleic acid to be introduced into a plant (and therefore useful in performing the methods of the invention) is any nucleic acid encoding the type of NAC transcription factor which will now be described. A “NAC transcription factor” as defined herein refers to any amino acid sequence which when used in the construction of a NAC phylogenetic tree, such as the one depicted in FIG. 1, tends to cluster with the group of NACs comprising an amino acid sequence represented by any one of SEQ ID NO: 2, SEQ ID NO: 51, SEQ ID NO: 53, SEQ ID NO: 55, SEQ ID NO: 57 or SEQ ID NO: 59, rather than with any other NAC group.

[0106] A person skilled in the art could readily determine whether any amino acid sequence in question falls within the definition of a “NAC transcription factor” using known techniques and software for the making of such a phylogenetic tree, such as a GCG, EBI or CLUSTAL package, using default parameters. The phylogenetic tree of FIG. 1 is taken from Ooka et al., 2003 (DNA Research 10, 239-247, 2003). The method for constructing such a phylogenetic tree is described in Ooka et al., 2003. In the phylogenetic tree of FIG. 1, SEQ ID NO: 2 is found in the group third up from the bottom, labelled “OsNAC7” and SEQ ID NO: 51, SEQ ID NO: 53, SEQ ID NO: 55, SEQ ID NO: 57 and SEQ ID NO: 59 are found in the area starting from (and including) the group labelled on the right hand side of the page as “ONAC022” and ending with (and including) the group labelled on the right hand side of the page as “OsNAC3”. Any sequence clustering within these areas, which comprises the sequences of SEQ ID NO: 2 on the one hand and SEQ ID NO: 51, SEQ ID NO: 53, SEQ ID NO: 55 SEQ ID NO: 57 and SEQ ID NO: 59 on the other hand, would be considered to fall within the aforementioned definition of a NAC transcription factor, and would be considered suitable for use in the methods of the invention.

[0107] Additionally or alternatively, a “NAC transcription factor” as defined herein is one comprising any one or more of the Motifs described below.

Motif I: KIDLDIIQELD (SEQ ID NO: 41), or a motif having in increasing order of preference at least 50%, 60%, 70%, 80% or 90% sequence identity to the sequence of Motif I.
Motif I is preferably K/P/R/G I/S/M D/A/E/Q L/I/V D I/V/F I Q/V/R/K E/D L/I/V D (SEQ ID NO: 41).
Motif II: CKYGXGHGGDEQTEW (SEQ ID NO: 42), or a motif having in increasing order of preference at least 50%, 60%, 70%, 80% or 90% sequence identity to the sequence of Motif II, where ‘X’ is taken to be any amino acid or a gap.
Motif II is preferably C K/R Y/L/I G XXX G/Y/N D/E E Q/R T/N/S EW (SEQ ID NO: 42), where ‘X’ is any amino acid or a gap.
Motif III: GWVVCRAFQKP (SEQ ID NO: 43), or a motif having in increasing order of preference at least 50%, 60%, 70%, 80% or 90% sequence identity to the sequence of Motif III.
Motif III is preferably GWVVCR A/V F X¹ K X² (SEQ ID NO: 43), where ‘X¹’ and ‘X²’ may be any amino acid, preferably X¹ is Q/R/K, preferably X² is P/R/K.
Motifs I to III are found in the NACs represented by SEQ ID NO: 2, and are also typically found in NACs clustering (in a phylogenetic tree of NACs) with the group of NACs comprising SEQ ID NO: 2-rather than with any other NAC group.
Motif IV: PVPIIA (SEQ ID NO: 111), or a motif having in increasing order of preference at least 50%, 60%, 70%, 80% or 90% sequence identity to the sequence of Motif IV.
Motif IV is preferably A/P/S/N V/L/I/A P/S/D/V/Q V/I I A/T/G (SEQ ID NO: 111).
Motif V: NGSRPN (SEQ ID NO: 112), or a motif having in increasing order of preference at least 50%, 60%, 70%, 80% or 90% sequence identity to the sequence of Motif V.
Motif V is preferably N G/S S/Q/A/V RP N/S (SEQ ID NO: 112).
Motif VI: CRLYNKK (SEQ ID NO: 113), or a motif having in increasing order of preference at least 50%, 60%, 70%, 80% or 90% sequence identity to the sequence of Motif VI.
Motif VI is preferably C/Y R/K L/I Y/H/F N/K K K/N/C/S/T (SEQ ID NO: 113).
Motifs III to VI are typically found in NACs of SEQ ID NO: 51, SEQ ID NO: 53, SEQ ID NO: 55 SEQ ID NO: 57 and SEQ ID NO: 59 and in NACs clustering (in a phylogenetic tree) with the NACs represented by the aforementioned SEQ ID NOs rather than with any other NAC group.
Motif VII: NEWEKMQ (SEQ ID NO: 114), or a motif having in increasing order of preference at least 50%, 60%, 70%, 80% or 90% sequence identity to the sequence of Motif VII.
Motif VII is preferably N E/Q/T WEK M/V Q/R/K (SEQ ID NO: 114).
Motif VIII: WGETRTPESE (SEQ ID NO: 115), or a motif having in increasing order of preference at least 50%, 60%, 70%, 80% or 90% sequence identity to the sequence Motif VIII.
Motif VIII is preferably WGE T/A RTPES E/D (SEQ ID NO: 115).
Motif IX: VPKKESMDDA (SEQ ID NO: 116), or a motif having in increasing order of preference at least 50%, 60%, 70%, 80% or 90% sequence identity to the sequence of Motif IX.
Motif IX is preferably V/L PK K/E E S/R/A/V M/V/A/Q/R D/E D/E/L A/G/D (SEQ ID NO: 116).
Motif X: SYDDIQGMYS (SEQ ID NO: 117), or a motif having in increasing order of preference at least 50%, 60%, 70%, 80% or 90% sequence identity to the sequence of Motif X.
Motif X is preferably S L/Y DD L/I Q G/S L/M/P G/Y S/N (SEQ ID NO: 117).
Motifs VII, VIII, IX and X are typically found in NACs of SEQ ID NO: 51 and in NACs clustering (in a phylogenetic tree) with the NAC of SEQ ID NO: 51 rather than with any other NAC group.
Motif XI: DSMPRLHADSSCSE (SEQ ID NO: 118), or a motif having in increasing order of preference at least 50%, 60%, 70%, 80% or 90% sequence identity to the sequence of Motif XI.
Motif XI is preferably DS M/V/I P R/K L/I/A H T/A/S D/E SS C/G SE (SEQ ID NO: 118).
Motif XI is typically found in NACs of SEQ ID NO: 53 and SEQ ID NO: 55 and in NACs clustering (in a phylogenetic tree) with the NACs represented by the aforementioned SEQ ID NOs rather than with any other NAC group.

[0108] Each of motifs I to XI may comprise one or more conservative amino acid substitution at any position.

[0109] Examples of NAC transcription factors as defined herein, i.e. any amino acid sequence which when used in the construction of a NAC phylogenetic tree, such as the one depicted in FIG. 1, tends to cluster with the group of NACs represented by any one of SEQ ID NO: 2, SEQ ID NO: 51, SEQ ID NO: 53, SEQ ID NO: 55 SEQ ID NO: 57 and SEQ ID NO: 59 rather than with any other NAC group, are as given in Tables 3 and 4 below.

TABLE 3
Examples of NAC transcription factors that cluster (in a phylogenetic tree)
with the NAC represented by SEQ ID NO: 2 rather than with any other NAC group

| | | NCBI Accession | | |
|---|---|---|---|---|
| Nucleic Acid | Amino Acid | Number | Other name (if any) | Source |
| SEQ ID NO: 1 | SEQ ID NO: 2 | XM_479673.1 | NAM2 (also called | Oryza sativa |
| | | | CDS4054 in the | |
| | | | alignment of FIG. 2) | |
| SEQ ID NO: 3 | SEQ ID NO: 4 | AK106313 | | Oryza sativa |
| SEQ ID NO: 5 | SEQ ID NO: 6 | NM_187584.1 | | Oryza sativa |
| SEQ ID NO: 7 | SEQ ID NO: 8 | XM_467007.1 | | Oryza sativa |
| SEQ ID NO: 9 | SEQ ID NO: 10 | XM_473322.1 | | Oryza sativa |
| SEQ ID NO: 11 | SEQ ID NO: 12 | ABE89364 | | Medicago |
| | | | | truncatula |
| SEQ ID NO: 13 | SEQ ID NO: 14 | NM_101098.2 | ANAC007/EMB2749 | Arabidopsis |
| | | | | thaliana |
| SEQ ID NO: 15 | SEQ ID NO: 16 | NM_104947.1 | ANAC026 | Arabidopsis |
| | | | | thaliana |
| SEQ ID NO: 17 | SEQ ID NO: 18 | XM_476289.1 | | Oryza sativa |
| SEQ ID NO: 19 | SEQ ID NO: 20 | NM_127362.1 | ANAC037 | Arabidopsis |
| | | | | thaliana |
| SEQ ID NO: 21 | SEQ ID NO: 22 | NM_119783.2 | ANAC076 | Arabidopsis |
| | | | | thaliana |
| SEQ ID NO: 23 | SEQ ID NO: 24 | NM_187584.1 | | Oryza sativa |
| SEQ ID NO: 25 | SEQ ID NO: 26 | NM_125632.1 | ANAC101 | Arabidopsis |
| | | | | thaliana |
| SEQ ID NO: 27 | SEQ ID NO: 28 | NM_126028.1 | ANAC105 | Arabidopsis |
| | | | | thaliana |
| SEQ ID NO: 29 | SEQ ID NO: 30 | AK071064.1 | | Oryza sativa |
| SEQ ID NO: 31 | SEQ ID NO: 32 | NM_105851.1 | ANAC030 | Arabidopsis |
| | | | | thaliana |
| SEQ ID NO: 33 | SEQ ID NO: 34 | NM_197511.1 | | Oryza sativa |
| SEQ ID NO: 35 | SEQ ID NO: 36 | AB217775.1 | | Zinnia elegans |
| SEQ ID NO: 37 | SEQ ID NO: 38 | AJ833965.1 | | Zea mays |

TABLE 4
Examples of NAC transcription factors that cluster (in a phylogenetic tree)
with the NAC represented by any one of SEQ ID NO: 51, SEQ ID NO: 53, SEQ ID
NO: 55 SEQ ID NO: 57 and SEQ ID NO: 59 rather than with any other NAC group

| | | | | |
|---|---|---|---|---|
| SEQ ID NO: 50 | SEQ ID NO: 51 | XM_470088.1 | NAC1 | Oryza sativa |
| | | | (also known as | |
| | | | CDS4035 in the | |
| | | | alignment of FIG. 2) | |
| SEQ ID NO: 52 | SEQ ID NO: -53 | AB028185.1 | NAC4 | Oryza sativa |
| | | BAA89800.1 | (known as OsNAC6 | |
| | | | in alignment of FIG. 2) | |
| SEQ ID NO: 54 | SEQ ID NO: 55 | AB028184.1 | NAC6 | Oryza sativa |
| | | BAA89799.1 | (known as OsNAC5 | |
| | | | in alignment of FIG. 2) | |
| SEQ ID NO: 56 | SEQ ID NO: 57 | AK107330.1 | NAC7 | Oryza sativa |
| | | | (known as ONAC24 | |
| | | | in alignment of FIG. 2) | |
| SEQ ID NO: 58 | SEQ ID NO: 59 | AK069257.1 | NAC3 | Oryza sativa |
| | | | (known as CDS4034 | |
| | | | in alignment of FIG. 2) | |
| SEQ ID NO: 60 | SEQ ID NO: 61 | AY625683.1 | NAC2-like | Triticum aestivum |
| | | AAU08786.1 | TaNAC2 | |
| SEQ ID NO: 62 | SEQ ID NO: 63 | AY103772.1 | PCO133091 | Zea mays |
| SEQ ID NO: 64 | SEQ ID NO: 65 | AJ010829.1 | GRAB1 | Triticum aestivum |
| | | CAA09371.1 | TACAA09371.1 | |
| SEQ ID NO: 66 | SEQ ID NO: 67 | NM_186659.2 | NAC3-like | Oryza sativa |
| | | NP_911548.1 | RiceNP_911548.1 | |
| SEQ ID NO: 68 | SEQ ID NO: 69 | DQ267442.1 | NAC1-like | Elaeis guineensis |
| | | ABB72844.1 | elaeis | |
| SEQ ID NO: 70 | SEQ ID NO: 71 | AB028183.1 | NAC4-like | Oryza sativa |
| | | BAA89798.1 | OsNAC4 | |
| SEQ ID NO: 72 | SEQ ID NO: 73 | DQ028770.1 | NAC2-like | Glycine max |
| | | AAY46122.1 | GmNAC2AAY46122.1 | |
| SEQ ID NO: 74 | SEQ ID NO: 75 | AY498713.1 | NAC-like | Lycopersicon |
| | | AAR88435.1 | tomatoNAC | esculentum |
| SEQ ID NO: 76 | SEQ ID NO: 77 | AY245883.1 | NAC5-8 | Brassica napus |
| | | AAP35052.1 | BrassicaNAC5- | |
| | | | 8″NAC-domain | |
| SEQ ID NO: 78 | SEQ ID NO: 79 | XM_475238.1 | NAC48 | Oryza sativa |
| | | XP_475238.1 | AK068392″putative | |
| SEQ ID NO: 80 | SEQ ID NO: 81 | AJ401151.1 | NAC | Solanum |
| | | CAC42087.1 | solanum″putative | tuberosum |
| SEQ ID NO: 82 | SEQ ID NO: 83 | NM_147856.2 | ATAF2 | Arabidopsis |
| | | NP_680161.1 | AT5G08790″ = ″ATAF | thaliana |
| | | | 2″NP_680161.1″ | |
| SEQ ID NO: 84 | SEQ ID NO: -85 | AF509873.1 | NH10 | Petunia × hybrida |
| | | AAM34773.1 | PetuniaNH10 = ″nam- | |
| | | | like | |
| SEQ ID NO: 86 | SEQ ID NO: 87 | AB218789 | NAC | Prunus mume |
| | | BAE48667.1 | PrunusPm74″NAC | |
| SEQ ID NO: 88 | SEQ ID NO: 89 | AY245885.1 | NAC18 | Brassica napus |
| | | AAP35054.1 | BnNAC18″NAC- | |
| | | | domain | |
| SEQ ID NO: 90 | SEQ ID NO: 91 | NM_125774.3 | ANAC102 | Arabidopsis |
| | | NP_201184.2 | | thaliana |
| SEQ ID NO: 92 | SEQ ID NO: 93 | AY714222.1 | NAC | Capsicum annuum |
| | | AAW48094.1 | CaNAC1 | |
| SEQ ID NO: 94 | SEQ ID NO: 95 | NM_100054.2 | ATAF1 | Arabidopsis |
| | | NP_171677 | | thaliana |
| SEQ ID NO: 96 | SEQ ID NO: 97 | AY573802.1 | NAC-NOR | Lycopersicon |
| | | AAU43922.1 | LeNAC- | esculentum |
| | | | NOR″transcription | |
| SEQ ID NO: 98 | SEQ ID NO: 99 | NM_118875.2 | RD26 | Arabidopsis |
| | | NP_567773.1 | Arabidopsis | thaliana |
| SEQ ID NO: 100 | SEQ ID NO: 101 | DQ022843.1 | NAC69-3 | Triticum aestivum |
| | | AAY44098.1 | NAC69-3″TaNAC69- | |
| | | | 3″″NAC | |
| SEQ ID NO: 102 | SEQ ID NO: 103 | A625682.1 | NAC69-1 | Triticum aestivum |
| | | AAU08785.1 | NAC69- | |
| | | | 1″TaNAC69″″NAC | |
| SEQ ID NO: 104 | SEQ ID NO: 105 | AY742218.1 | NAC23 | Saccharaum |
| | | AAW62955.1 | Saccharum | officinarum |
| SEQ ID NO: 106 | SEQ ID NO: 107 | AK063406.1 | NAC10 | Oryza sativa |
| | | | ONAC10AK063406 | |
| SEQ ID NO: 108 | SEQ ID NO: 109 | AC145753.1 | NAM | Medicago |
| | | | medicagoNAClike | truncatula |

[0110] The invention is illustrated by transforming plants with the Oryza sativa sequence represented by SEQ ID NO: 1, encoding the polypeptide sequence of SEQ ID NO: 2, and with the Oryza sativa sequence represented by SEQ ID NO: 50, encoding the polypeptide sequence of SEQ ID NO: 51, and with the Oryza sativa sequence represented by SEQ ID NO: 52, encoding the polypeptide sequence of SEQ ID NO: 53, and with the Oryza sativa sequence represented by SEQ ID NO: 54, encoding the polypeptide of SEQ ID NO: 55, and with the Oryza sativa sequence represented by SEQ ID NO: 56, encoding the polypeptide of SEQ ID NO: 57, and with the Oryza sativa sequence represented by SEQ ID NO: 58, encoding the polypeptide of SEQ ID NO: 59, however performance of the invention is not restricted to these sequences. The methods of the invention may be performed using any nucleic acid encoding a NAC transcription factor as defined herein, such as any of the nucleic acid sequences given in Tables 3 and 4.

[0111] The NAC amino acid sequences given in Table 3 may be considered to be orthologues and paralogues of the NAC represented by SEQ ID NO: 2. The NAC amino acid sequences given in Table 4 may be considered to be orthologues and paralogues of the NAC represented by any one of SEQ ID NO: 51, SEQ ID NO: 53, SEQ ID NO: 55 SEQ ID NO: 57 and SEQ ID NO: 59.

[0112] Orthologues and paralogues may easily be found by performing a so-called reciprocal blast search as described in the “definitions” section herein. Where the query sequence is any of SEQ ID NO: 1 or SEQ ID NO: 2, or SEQ ID NO: 50 to SEQ ID NO: 59, the second BLAST would therefore be against Oryza sequences.

[0113] Table 3 gives examples of orthologues and paralogues of the NAC represented by SEQ ID NO 2. Table 4 gives examples of orthologues and paralogues of the NAC represented by SEQ ID NO: 51, SEQ ID NO: 53, SEQ ID NO: 55 SEQ ID NO: 57 and SEQ ID NO: 59. Further orthologues and paralogues may readily be identified using the BLAST procedure described above and by following the procedure given in the Examples section.

[0114] The NAC proteins are identifiable by the presence of a highly conserved N-terminal NAC domain (shown in FIG. 5), accompanied by diverse C-terminal domains.

[0115] Specialist databases also exist for the identification of domains. The NAC domain in a NAC transcription factor may be identified as explained in the “definitions” section.

[0116] NAC domains may also be identified using routine techniques, such as by sequence alignment as explained in the “definitions” section herein.

[0117] The invention also provides hitherto unknown NAC-encoding nucleic acids and NAC polypeptides.

[0118] According to a further embodiment of the present invention, there is therefore provided an isolated nucleic acid molecule comprising:

(i) a nucleic acid represented by one of SEQ ID NO: 347, SEQ ID NO: 349, SEQ ID NO: 351, SEQ ID NO: 353, SEQ ID NO: 355, SEQ ID NO: 357, SEQ ID NO: 359, SEQ ID NO: 361, or SEQ ID NO: 363;
(ii) the complement of a nucleic acid represented by one of SEQ ID NO: 347, SEQ ID NO: 349, SEQ ID NO: 351, SEQ ID NO: 353, SEQ ID NO: 355, SEQ ID NO: 357, SEQ ID NO: 359, SEQ ID NO: 361, or SEQ ID NO: 363;
(iii) a nucleic acid encoding a NAC polypeptide having, in increasing order of preference, at least 50%, 55%, 60%, 65%, 70%, 75%, 80%, 85%, 90%, 95%, 96%, 97%, 98%, 99% or more sequence identity to the amino acid sequence represented by one of SEQ ID NO: 348, SEQ ID NO: 350, SEQ ID NO: 352, SEQ ID NO: 354, SEQ ID NO: 356, SEQ ID NO: 358, SEQ ID NO: 360, SEQ ID NO: 362, or SEQ ID NO: 364.

[0119] According to a further embodiment of the present invention, there is also provided an isolated polypeptide comprising:

(i) an amino acid sequence represented by one of SEQ ID NO: SEQ ID NO: 348, SEQ ID NO: 350, SEQ ID NO: 352, SEQ ID NO: 354, SEQ ID NO: 356, SEQ ID NO: 358, SEQ ID NO: 360, SEQ ID NO: 362, or SEQ ID NO: 364;
(ii) an amino acid sequence having, in increasing order of preference, at least 50%, 55%, 60%, 65%, 70%, 75%, 80%, 85%, 90%, 95%, 96%, 97%, 98%, 99% or more sequence identity to the amino acid sequence represented by one of SEQ ID NO: 348, SEQ ID NO: 350, SEQ ID NO: 352, SEQ ID NO: 354, SEQ ID NO: 356, SEQ ID NO: 358, SEQ ID NO: 360, SEQ ID NO: 362, or SEQ ID NO: 364;
(iii) derivatives of any of the amino acid sequences given in (i) or (ii) above.

[0120] Nucleic acids encoding NAC transcription factors defined herein need not be full-length nucleic acids, since performance of the methods of the invention does not rely on the use of full length nucleic acid sequences. Examples of nucleic acids suitable for use in performing the methods of the invention include the nucleic acid sequences given in Tables 3 and 4, but are not limited to those sequences. Nucleic acid variants may also be useful in practising the methods of the invention. Examples of such nucleic acid variants include portions of nucleic acids encoding a NAC transcription factor as defined herein, splice variants of nucleic acids encoding a NAC transcription factor as defined herein, allelic variants of nucleic acids encoding a NAC transcription factor as defined herein and variants of nucleic acids encoding a NAC transcription factor as defined herein that are obtained by gene shuffling. The terms portion, splice variant, allelic variant and gene shuffling will now be described.

[0121] According to the present invention, there is provided a method for enhancing yield-related traits in plants, comprising introducing and expressing in a plant a portion of any one of the nucleic acid sequences given in Tables 3 and 4, or a portion of a nucleic acid encoding an orthologue, paralogue or homologue of any of the amino acid sequences given in Tables 3 and 4.

[0122] Portions useful in the methods of the invention, encode a polypeptide falling within the definition of a NAC transcription factor as defined herein and having substantially the same biological activity as the NAC transcription factor represented by any of the amino acid sequences given in Tables 3 and 4. The portion is typically at least 600 consecutive nucleotides in length, preferably at least 700 consecutive nucleotides in length, more preferably at least 800 consecutive nucleotides in length and most preferably at least 900 consecutive nucleotides in length, the consecutive nucleotides being of any one of the nucleic acid sequences given in Tables 3 and 4. Preferably, the portion is a portion of any one of the nucleic acids given in Tables 3 and 4. Most preferably the portion is a portion of the nucleic acid of SEQ ID NO: 1, SEQ ID NO: 50, SEQ ID NO: 52, SEQ ID NO: 54, SEQ ID NO: 56 or SEQ ID NO: 58. Preferably, the portion encodes an amino acid sequence comprising any one or more of Motifs I to XI as defined herein.

[0123] A portion of a nucleic acid encoding a NAC transcription factor as defined herein may be prepared, for example, by making one or more deletions to the nucleic acid in question. The portions may be used in isolated form or they may be fused to other coding (or non coding) sequences in order to, for example, produce a protein that combines several activities. When fused to other coding sequences, the resultant polypeptide produced upon translation may be bigger than that predicted for the NAC transcription factor portion.

[0124] Another nucleic acid variant useful in the methods of the invention is a nucleic acid capable of hybridising, under reduced stringency conditions, preferably under stringent conditions, with a nucleic acid encoding a NAC transcription factor as defined herein, or with a portion as defined herein.

[0125] Hybridising sequences useful in the methods of the invention, encode a polypeptide having a NAC domain (as described above) and having substantially the same biological activity as the NAC transcription factor represented by any of the amino acid sequences given in Tables 3 and 4. The hybridising sequence is typically at least 600 consecutive nucleotides in length, preferably at least 700 consecutive nucleotides in length, more preferably at least 800 consecutive nucleotides in length and most preferably at least 900 consecutive nucleotides in length. Preferably, the hybridising sequence is one that is capable of hybridising to any of the nucleic acids given in Table 3 and 4, or to a portion of any of these sequences, a portion being as defined above. Most preferably, the hybridising sequence is capable of hybridising to a nucleic acid as represented by SEQ ID NO: 1, SEQ ID NO: 50, SEQ ID NO: 52, SEQ ID NO: 54, SEQ ID NO: 56 or SEQ ID NO: 58 capable of hybridising to a portion of any of the aforementioned sequences. Preferably, the sequence capable of hybridizing encodes a polypeptide comprising any one or more of Motifs I to XI as defined herein.

[0126] According to the present invention, there is provided a method for enhancing yield-related traits in plants, comprising introducing and expressing in a plant a nucleic acid capable of hybridizing to any one of the nucleic acids given in Tables 3 and 4, or comprising introducing and expressing in a plant a nucleic acid capable of hybridising to a nucleic acid encoding an orthologue, paralogue or homologue of any of the nucleic acid sequences given in Tables 3 and 4.

[0127] Another nucleic acid variant useful in the methods of the invention is a splice variant encoding a NAC transcription factor as defined hereinabove.

[0128] According to the present invention, there is provided a method for enhancing yield-related traits in plants, comprising introducing and expressing in a plant a splice variant of any one of the nucleic acid sequences given in Tables 3 and 4, or a splice variant of a nucleic acid encoding an orthologue, paralogue or homologue of any of the amino acid sequences given in Tables 3 and 4.

[0129] Preferred splice variants are splice variants of a nucleic acid represented by any of SEQ ID NO: 1, SEQ ID NO: 50, SEQ ID NO: 52, SEQ ID NO: 54, SEQ ID NO: 56 or SEQ ID NO: 58, or splice variants encoding orthologues or paralogues of any of the amino acid sequences given in Tables 3 and 4. Preferably, the splice variants encode a polypeptide comprising any one or more of Motifs I to XI as defined herein.

[0130] Another nucleic acid variant useful in performing the methods of the invention is an allelic variant of a nucleic acid encoding a NAC transcription factor as defined hereinabove.

[0131] According to the present invention, there is provided a method for enhancing yield-related traits in plants, comprising introducing and expressing in a plant an allelic variant of any one of the nucleic acids given in Tables 3 and 4, or comprising introducing and expressing in a plant an allelic variant of a nucleic acid encoding an orthologue, paralogue or homologue of any of the amino acid sequences given in Tables 3 and 4.

[0132] Preferably, the allelic variant is an allelic variant of SEQ ID NO: 1, SEQ ID NO: 50, SEQ ID NO: 52, SEQ ID NO: 54, SEQ ID NO: 56 or SEQ ID NO: 58, or an allelic variant of a nucleic acid encoding an orthologue or paralogue of any of the aforementioned SEQ ID NOs. Preferably, the allelic variant encodes a polypeptide comprising any one or more of Motifs I to XI as defined herein.

[0133] A further nucleic acid variant useful in the methods of the invention is a nucleic acid variant obtained by gene shuffling. Gene shuffling or directed evolution may also be used to generate variants of nucleic acids encoding NAC transcription factors as defined above.

[0134] According to the present invention, there is provided a method for enhancing yield-related traits in plants, comprising introducing and expressing in a plant a variant of any one of the nucleic acid sequences given in Tables 3 and 4, or comprising introducing and expressing in a plant a variant of a nucleic acid encoding an orthologue, paralogue or homologue of any of the amino acid sequences given in Tables 3 and 4, which variant nucleic acid is obtained by gene shuffling. Preferably, the variants obtained by gene shuffling encode a polypeptide comprising any one or more of Motifs I to XI as defined herein.

[0135] Furthermore, nucleic acid variants may also be obtained by site-directed mutagenesis. Several methods are available to achieve site-directed mutagenesis, the most common being PCR based methods (current protocols in molecular biology. Wiley Eds).

[0136] Also useful in the methods of the invention are nucleic acids encoding homologues of any one of the amino acid sequences given in Tables 3 and 4.

[0137] Also useful in the methods of the invention are nucleic acids encoding derivatives of any one of the amino acids given in Table 3 or orthologues or paralogues of any of the aforementioned SEQ ID NOs. Preferred derivatives are derivatives of the proteins represented by SEQ ID NO: 2, SEQ ID NO: 51, SEQ ID NO: 53, SEQ ID NO: 55, SEQ ID NO: 57 or SEQ ID NO: 59.

[0138] Furthermore, NAC transcription factors (at least in their native form) typically have DNA-binding activity and an activation domain. A person skilled in the art may easily determine the presence of an activation domain and DNA-binding activity using routine tools and techniques.

[0139] Nucleic acids encoding NAC transcription factors may be derived from any natural or artificial source. The nucleic acid may be modified from its native form in composition and/or genomic environment through deliberate human manipulation. Preferably the NAC transcription factor-encoding nucleic acid is from a plant, further preferably from a monocot, more preferably from the Poaceae family, most preferably the nucleic acid is from Oryza sativa.

[0140] Any reference herein to a NAC transcription factor is therefore taken to mean a NAC transcription factor as defined above. Any nucleic acid encoding such a NAC transcription factor is suitable for use in performing the methods of the invention.

[0141] The present invention also encompasses plants or parts thereof (including seeds) obtainable by the methods according to the present invention. The plants or parts thereof comprise a nucleic acid transgene encoding a NAC transcription factor as defined above.

[0142] The invention also provides genetic constructs and vectors to facilitate introduction and/or expression of the nucleic acid sequences useful in the methods according to the invention, in a plant.

[0143] Therefore, there is provided a gene construct comprising:
[0144] i. Any nucleic acid encoding a NAC transcription factor as defined hereinabove;
[0145] ii. One or more control sequences operably linked to the nucleic acid of (i).

[0146] Constructs useful in the methods according to the present invention may be constructed using recombinant DNA technology well known to persons skilled in the art. The gene constructs may be inserted into vectors, which may be commercially available, suitable for transforming into plants and suitable for expression of the gene of interest in the transformed cells. The invention therefore provides use of a gene construct as defined hereinabove in the methods of the invention.

[0147] Plants are transformed with a vector comprising the sequence of interest (i.e., a nucleic acid encoding a NAC transcription factor). The skilled artisan is well aware of the genetic elements that must be present in the vector in order to successfully transform, select and propagate host cells containing the sequence of interest. The sequence of interest is operably linked to one or more control sequences (at least to a promoter).

[0148] According to one preferred feature of the invention, the nucleic acid encoding a NAC transcription factor is operably linked to a constitutive promoter. A constitutive promoter is transcriptionally active during most but not necessarily all phases of its growth and development and is substantially ubiquitously expressed. The constitutive promoter is preferably a GOS2 promoter, more preferably the constitutive promoter is a rice GOS2 promoter, further preferably the constitutive promoter is represented by a nucleic acid sequence substantially similar to SEQ ID NO: 39 or SEQ ID NO: 339, most preferably the constitutive promoter is as represented by SEQ ID NO: 39 or SEQ ID NO: 339.

[0149] It should be clear that the applicability of the present invention is not restricted to the NAC transcription factor-encoding nucleic acid represented by SEQ ID NO: 1, SEQ ID NO: 50, SEQ ID NO: 52, SEQ ID NO: 54, SEQ ID NO: 56 or SEQ ID NO: 58, nor is the applicability of the invention restricted to expression of a such a NAC transcription factor-encoding nucleic acid when driven by a GOS2 promoter. Examples of other constitutive promoters which may also be used to perform the methods of the invention are shown in Table 2a in the “definitions” section herein.

[0150] According to another preferred feature of the invention, the nucleic acid encoding a NAC-type transcription factor is operably linked to a young green tissue-specific promoter. A young green tissue-specific promoter as defined herein is a promoter that is transcriptionally active predominantly in young green tissue, substantially to the exclusion of any other parts of a plant, whilst still allowing for any leaky expression in these other plant parts. The young green tissue-specific promoter is preferably a protochlorophylid reductase promoter, more preferably the protochlorophylid reductase promoter represented by a nucleic acid sequence substantially similar to SEQ ID NO: 40, most preferably the promoter is as represented by SEQ ID NO: 40.

[0151] It should be clear that the applicability of the present invention is not restricted to the NAC transcription factor-encoding nucleic acid represented by SEQ ID NO: 1, nor is the applicability of the invention restricted to expression of a such a NAC transcription factor-encoding nucleic acid when driven by a protochlorophylid reductase promoter.

[0152] Examples of other young green tissue-specific promoters which may also be used to perform the methods of the invention are shown in Table 2c above.

[0153] According to another preferred feature of the invention, the nucleic acid encoding a NAC-type transcription factor is operably linked to a root-specific promoter (internal reference pro0110). A root-specific promoter as defined herein is a promoter that is transcriptionally active predominantly in plant roots, substantially to the exclusion of any other parts of a plant, whilst still allowing for any leaky expression in these other plant parts. The root-specific promoter is preferably an RCc3 promoter (Plant Mol Biol. 1995 January; 27(2):237-48), more preferably the RCc3 promoter is from rice, further preferably the RCc3 promoter is represented by a nucleic acid sequence substantially similar to SEQ ID NO: 110, most preferably the promoter is as represented by SEQ ID NO: 110.

[0154] It should be clear that the applicability of the present invention is not restricted to the NAC transcription factor-encoding nucleic acid represented by SEQ ID NO: 50, SEQ ID NO: 52, SEQ ID NO: 54, SEQ ID NO: 56 or SEQ ID NO: 58, nor is the applicability of the invention restricted to expression of a such a NAC transcription factor-encoding nucleic acid when driven by an RCc3 promoter.

[0155] Examples of other root-specific promoters which may also be used to perform the methods of the invention are shown in Table 2b above.

[0156] Optionally, one or more terminator sequences may be used in the construct introduced into a plant. Additional regulatory elements may include transcriptional as well as translational enhancers. Those skilled in the art will be aware of terminator and enhancer sequences that may be suitable for use in performing the invention. An intron sequence may also be added to the 5′ untranslated region (UTR) or in the coding sequence to increase the amount of the mature message that accumulates in the cytosol, as described in the definitions section. Other control sequences (besides promoter, enhancer, silencer, intron sequences, 3′UTR and/or 5′UTR regions) may be protein and/or RNA stabilizing elements. Such sequences would be known or may readily be obtained by a person skilled in the art.

[0157] The genetic constructs of the invention may further include an origin of replication sequence that is required for maintenance and/or replication in a specific cell type. One example is when a genetic construct is required to be maintained in a bacterial cell as an episomal genetic element (e.g. plasmid or cosmid molecule). Preferred origins of replication include, but are not limited to, the f1-ori and colE1. The genetic construct may optionally comprise a selectable marker gene. Selectable markers are described in more detail in the “definitions” section herein. The marker genes may be removed or excised from the transgenic cell once they are no longer needed. Techniques for marker removal are known in the art, useful techniques are described above in the definitions section.

[0158] The invention also provides a method for the production of transgenic plants having enhanced yield-related traits relative to control plants, comprising introduction and expression in a plant of any nucleic acid encoding a NAC transcription factor as defined hereinabove.

[0159] More specifically, the present invention provides a method for the production of transgenic plants having enhanced yield-related traits, which method comprises:
[0160] i. introducing and expressing a nucleic acid encoding a NAC transcription factor (as defined herein) in a plant cell; and
[0161] ii. cultivating the plant cell under conditions promoting plant growth and development.

[0162] The nucleic acid may be introduced directly into a plant cell or into the plant itself (including introduction into a tissue, organ or any other part of a plant). According to a preferred feature of the present invention, the nucleic acid is preferably introduced into a plant by transformation.

[0163] The genetically modified plant cells can be regenerated via all methods with which the skilled worker is familiar. Suitable methods can be found in the abovementioned publications by S. D. Kung and R. Wu, Potrykus or Hofgen and Willmitzer.

[0164] Generally after transformation, plant cells or cell groupings are selected for the presence of one or more markers which are encoded by plant-expressible genes co-transferred with the gene of interest, following which the transformed material is regenerated into a whole plant. To select transformed plants, the plant material obtained in the transformation is, as a rule, subjected to selective conditions so that transformed plants can be distinguished from untransformed plants. For example, the seeds obtained in the above-described manner can be planted and, after an initial growing period, subjected to a suitable selection by spraying.

[0165] A further possibility consists in growing the seeds, if appropriate after sterilization, on agar plates using a suitable selection agent so that only the transformed seeds can grow into plants. Alternatively, the transformed plants are screened for the presence of a selectable marker such as the ones described above.

[0166] Following DNA transfer and regeneration, putatively transformed plants may also be evaluated, for instance using Southern analysis, for the presence of the gene of interest, copy number and/or genomic organisation. Alternatively or additionally, expression levels of the newly introduced DNA may be monitored using Northern and/or Western analysis, both techniques being well known to persons having ordinary skill in the art.

[0167] The generated transformed plants may be propagated by a variety of means, such as by clonal propagation or classical breeding techniques. For example, a first generation (or T1) transformed plant may be selfed and homozygous second-generation (or T2) transformants selected, and the T2 plants may then further be propagated through classical breeding techniques. The generated transformed organisms may take a variety of forms. For example, they may be chimeras of transformed cells and non-transformed cells; clonal transformants (e.g., all cells transformed to contain the expression cassette); grafts of transformed and untransformed tissues (e.g., in plants, a transformed rootstock grafted to an untransformed scion).

[0168] The present invention clearly extends to any plant cell or plant produced by any of the methods described herein, and to all plant parts and propagules thereof. The present invention extends further to encompass the progeny of a primary transformed or transfected cell, tissue, organ or whole plant that has been produced by any of the aforementioned methods, the only requirement being that progeny exhibit the same genotypic and/or phenotypic characteristic(s) as those produced by the parent in the methods according to the invention.

[0169] The invention also includes host cells containing an isolated nucleic acid encoding a NAC transcription factor as defined hereinabove. Preferred host cells according to the invention are plant cells.

[0170] The invention also extends to harvestable parts of a plant such as, but not limited to seeds, leaves, fruits, flowers, stems, rhizomes, tubers and bulbs. The invention furthermore relates to products derived, preferably directly derived, from a harvestable part of such a plant, such as dry pellets or powders, oil, fat and fatty acids, starch or proteins.

[0171] According to a preferred feature of the invention, the modulated expression is increased expression. Methods for increasing expression of nucleic acids or genes, or gene products, are well documented in the art. Examples of methods for increasing expression are given in the “definitions” section herein.

[0172] As mentioned above, a preferred method for modulating (preferably, increasing) expression of a nucleic acid encoding a NAC transcription factor is by introducing and expressing in a plant a nucleic acid encoding a NAC transcription factor; however the effects of performing the method, i.e. enhancing yield-related traits may also be achieved using other well known techniques, such as T-DNA activation, TILLING, homologous recombination or directed evolution. A description of some of these techniques is given in the “definitions” section herein.

[0173] According to a preferred feature of the present invention, performance of the methods of the invention gives plants having an increased growth rate relative to control plants, particularly during the early stages of plant development (typically three weeks post germination in the case of rice and maize, but this will vary from species to species) leading to early vigour. Therefore, according to the present invention, there is provided a method for increasing the growth rate of plants, which method comprises modulating expression, preferably increasing expression, in a plant of a nucleic acid encoding a particular type of NAC transcription factor, as defined herein. The present invention also provides a method for obtaining plants having early vigour relative to control plants, which method comprises modulating, preferably increasing, expression in a plant of a nucleic acid encoding a NAC transcription factor as defined herein.

[0174] Early vigour may also result from or be manifested as increased plant fitness relative to control plants due to, for example, the plants being better adapted to their environment (i.e. being more able to cope with various abiotic or biotic stress factors). Plants having early vigour also show better establishment of the crop (with the crop growing in uniform manner, i.e. with the majority of plants reaching the various stages of development at substantially the same time), and show better growth and often better yield. Early vigour may be determined by measuring various factors, such as seedling growth rate, thousand kernel weight, percentage germination, percentage emergence, seedling height, root length and shoot biomass and many more.

[0175] Performance of the methods of the invention gives plants grown under non-stress conditions or under mild drought conditions increased yield relative to control plants grown under comparable conditions. Therefore, according to the present invention, there is provided a method for increasing yield in plants grown under non-stress conditions or under mild drought conditions, which method comprises increasing expression in a plant of a nucleic acid encoding a NAC transcription factor.

[0176] Performance of the methods of the invention gives plants grown under conditions of nutrient deficiency, particularly under conditions of nitrogen deficiency, increased yield relative to control plants grown under comparable conditions. Therefore, according to the present invention, there is provided a method for increasing yield in plants grown under conditions of nutrient deficiency, which method comprises increasing expression in a plant of a nucleic acid encoding a POI polypeptide. Nutrient deficiency may result from a lack of nutrients such as nitrogen, phosphates and other phosphorous-containing compounds, potassium, calcium, cadmium, magnesium, manganese, iron and boron, amongst others.

[0177] In the case of use in the methods of the invention of nucleic acids encoding NAC4 transcription factors (for example, SEQ ID NO: 52) and NAC4 transcription factors themselves (for example SEQ ID NO: 53), an increase in yield and/or seed yield and/or growth rate was found to occur in plants grown under substantially non-stress conditions and under conditions of stress compared to control plants.

[0178] A “NAC4 transcription factor” as defined herein refers to any amino acid sequence which when used in the construction of a NAC phylogenetic tree, such as the one depicted in FIG. 1, tends to cluster with the group of NACs comprising an amino acid sequence represented by SEQ ID NO: 53 rather than with any other NAC group.

[0179] The NAC4 transcription factor may also comprise Motif XI: DSMPRLHADSSCSE (SEQ ID NO: 118), or a motif having in increasing order of preference at least 50%, 60%, 70%, 80% or 90% sequence identity to the sequence of Motif XI.

[0180] Motif XI is preferably DS M/V/I P R/K L/I/A H T/A/S D/E SS C/G SE (SEQ ID NO: 118).

[0181] Motif XI is typically found in NACs of SEQ ID NO: 53 and SEQ ID NO: 55 and in NACs clustering (in a phylogenetic tree) with the NACs represented by the aforementioned SEQ ID NOs rather than with any other NAC group. Motif XI may comprise one or more conservative amino acid substitution at any position.

[0182] Plants typically respond to exposure to stress by growing more slowly. In conditions of severe stress, the plant may even stop growing altogether. Mild stress on the other hand is defined herein as being any stress to which a plant is exposed which does not result in the plant ceasing to grow altogether without the capacity to resume growth. Mild stress in the sense of the invention leads to a reduction in the growth of the stressed plants of less than 40%, 35% or 30%, preferably less than 25%, 20% or 15%, more preferably less than 14%, 13%, 12%, 11% or 10% or less in comparison to the control plant under non-stress conditions. Due to advances in agricultural practices (irrigation, fertilization, pesticide treatments) severe stresses are not often encountered in cultivated crop plants. As a consequence, the compromised growth induced by mild stress is often an undesirable feature for agriculture. Mild stresses are the typical stresses to which a plant may be exposed. These stresses may be the everyday biotic and/or abiotic (environmental) stresses to which a plant is exposed. Typical abiotic or environmental stresses include temperature stresses caused by atypical hot or cold/freezing temperatures; salt stress; water stress (drought or excess water), anaerobic stress, chemical toxicity and oxidative stress. The abiotic stress may be an osmotic stress caused by a water stress (particularly due to drought), salt stress, oxidative stress or an ionic stress. Chemicals may also cause abiotic stresses (for example too high or too low concentrations of minerals or nutrients). Biotic stresses are typically those stresses caused by pathogens, such as bacteria, viruses, fungi and insects. The term “non-stress conditions” as used herein are those environmental conditions that do not significantly go beyond the everyday climatic and other abiotic conditions that plants may encounter, and which allow optimal growth of the plant. Persons skilled in the art are aware of normal soil conditions and climatic conditions for a given geographic location.

[0183] Abiotic stress leads to a series of morphological, physiological, biochemical and molecular changes that adversely affect plant growth and productivity (Wang et al. (Planta (2003) 218: 1-14). Drought, salinity, extreme temperatures and oxidative stress are known to be interconnected and may induce growth and cellular damage through similar mechanisms. For example, drought and/or salinisation are manifested primarily as osmotic stress, resulting in the disruption of homeostasis and ion distribution in the cell. Oxidative stress, which frequently accompanies high or low temperature, salinity or drought stress may cause denaturation of functional and structural proteins. As a consequence, these diverse environmental stresses often activate similar cell signaling pathways and cellular responses, such as the production of stress proteins, up-regulation of anti-oxidants, accumulation of compatible solutes and growth arrest.

[0184] Since diverse environmental stresses activate similar pathways, the exemplification of the present invention with drought stress (in the case of use of nucleic acids encoding NAC4 transcription factors, and NAC4 transcription factors themselves, in the methods of the invention) should not be seen as a limitation to drought stress, but more as a screen to indicate the involvement of NAC4-encoding nucleic acids and NAC4 transcription factors in abiotic stresses in general. Furthermore, the methods of the present invention may be performed under non-stress conditions or under conditions of mild drought to give plants having enhanced yield-related traits (particularly increased yield and seed yield) relative to control plants.

[0185] A particularly high degree of “cross talk” is reported between drought stress and high-salinity stress (Rabbani et al. (2003) Plant Physiol 133: 1755-1767). For example, drought and/or salinisation are manifested primarily as osmotic stress, resulting in the disruption of homeostasis and ion distribution in the cell. Therefore, it would be apparent that nucleic acids encoding NAC4 transcription factors, and NAC4 transcription factors themselves would, along with their usefulness in conferring drought-tolerance in plants, also find use in protecting the plant against various other osmotic stresses. Similarly, it would be apparent that nucleic acids encoding NAC4 transcription factors, and NAC4 transcription factors themselves would, along with their usefulness in conferring salt-tolerance in plants, also find use in protecting the plant against various other abiotic stresses. Furthermore, oxidative stress, which frequently accompanies high or low temperatures, salinity or drought stress, may cause denaturing of functional and structural proteins. As a consequence, these diverse environmental stresses often activate similar cell signaling pathways and cellular responses, such as the production of stress proteins, up-regulation of anti-oxidants, accumulation of compatible solutes and growth arrest. Furthermore, Rabbani et al. (2003, Plant Physiol 133: 1755-1767) report that similar molecular mechanisms of stress tolerance and responses exist between dicots and monocots. The methods of the invention are therefore advantageously applicable to any plant.

[0186] The term “abiotic stress” as defined herein is taken to mean any one or more of: water stress (due to drought or excess water), anaerobic stress, salt stress, nutrient stress, temperature stress (due to hot, cold or freezing temperatures), chemical toxicity stress and oxidative stress. According to one aspect of the invention, the abiotic stress is an osmotic stress, selected from water stress, salt stress, oxidative stress and ionic stress. Preferably, the water stress is drought stress. The term salt stress is not restricted to common salt (NaCl), but may be any one or more of: NaCl, KCl, LiCl, MgCl₂, CaCl₂, Phosphorous salts, amongst others. Nutrient stress may be caused by a lack or excess of nutrients such as nitrogen, phosphates and other phosphorous-containing compounds, potassium, calcium, cadmium, magnesium, manganese, iron and boron, amongst others.

[0187] Increased tolerance to abiotic stress is manifested by increased plant yield under abiotic stress conditions as defined above. Insofar as the invention concerns the use of NAC4 transcription factors and their encoding nucleic acids, such increased yield may include one or more of the following: increased seed size, increased seed weight, increased aboveground biomass, increased plant height, increased root biomass, increased number of flowers per panicle and increased number of first panicles, each relative to control plants.

[0188] According to the present invention, there is provided a method for enhancing yield-related traits in plants grown under abiotic stress conditions relative to control plants, comprising modulating expression in a plant of a nucleic acid encoding a NAC4 transcription factor. According to one aspect of the invention, the abiotic stress is osmotic stress, selected from one or more of the following: water stress, salt stress, oxidative stress, nutrient stress and ionic stress. Preferably, the water stress is drought stress.

[0189] The methods of the invention are advantageously applicable to any plant.

[0190] Plants that are particularly useful in the methods of the invention include all plants which belong to the superfamily Viridiplantae, in particular monocotyledonous and dicotyledonous plants including fodder or forage legumes, ornamental plants, food crops, trees or shrubs. According to a preferred embodiment of the present invention, the plant is a crop plant. Examples of crop plants include soybean, sunflower, canola, alfalfa, rapeseed, cotton, tomato, potato and tobacco. Further preferably, the plant is a monocotyledonous plant. Examples of monocotyledonous plants include sugarcane. More preferably the plant is a cereal. Examples of cereals include rice, maize, wheat, barley, millet, triticale, rye, sorghum and oats. Plants in which early vigour is a particularly desirably trait include rice, maize, wheat, sunflower, sorghum.

[0191] The present invention also encompasses use of nucleic acids encoding NAC transcription factors and use of NAC transcription factor polypeptides in enhancing yield-related traits.

[0192] Nucleic acids encoding NAC transcription factors or NAC transcription factors themselves, may find use in breeding programmes in which a DNA marker is identified which may be genetically linked to a NAC transcription factor-encoding gene. The nucleic acids/genes, or the NAC transcription factors themselves may be used to define a molecular marker. This DNA or protein marker may then be used in breeding programmes to select plants having enhanced yield as defined hereinabove in the methods of the invention.

[0193] Allelic variants of NAC transcription factor-encoding nucleic acids/genes may also find use in marker-assisted breeding programmes. Such breeding programmes sometimes require introduction of allelic variation by mutagenic treatment of the plants, using for example EMS mutagenesis; alternatively, the programme may start with a collection of allelic variants of so called “natural” origin caused unintentionally. Identification of allelic variants then takes place, for example, by PCR. This is followed by a step for selection of superior allelic variants of the sequence in question and which give increased yield. Selection is typically carried out by monitoring growth performance of plants containing different allelic variants of the sequence in question. Growth performance may be monitored in a greenhouse or in the field. Further optional steps include crossing plants in which the superior allelic variant was identified with another plant. This could be used, for example, to make a combination of interesting phenotypic features.

[0194] Nucleic acids encoding NAC transcription factors may also be used as probes for genetically and physically mapping the genes that they are a part of, and as markers for traits linked to those genes. Such information may be useful in plant breeding in order to develop lines with desired phenotypes. Such use of NAC transcription factor encoding nucleic acids requires only a nucleic acid sequence of at least 15 nucleotides in length. The NAC transcription factor-encoding nucleic acids may be used as restriction fragment length polymorphism (RFLP) markers. Southern blots (Sambrook J, Fritsch E F and Maniatis T (1989) Molecular Cloning, A Laboratory Manual) of restriction-digested plant genomic DNA may be probed with the NAC transcription factor-encoding nucleic acids. The resulting banding patterns may then be subjected to genetic analyses using computer programs such as MapMaker (Lander et al. (1987) Genomics 1: 174-181) in order to construct a genetic map. In addition, the nucleic acids may be used to probe Southern blots containing restriction endonuclease-treated genomic DNAs of a set of individuals representing parent and progeny of a defined genetic cross. Segregation of the DNA polymorphisms is noted and used to calculate the position of the NAC transcription factor-encoding nucleic acid in the genetic map previously obtained using this population (Botstein et al. (1980) Am. J. Hum. Genet. 32:314-331).

[0195] The production and use of plant gene-derived probes for use in genetic mapping is described in Bematzky and Tanksley (1986) Plant Mol. Biol. Reporter 4: 37-41. Numerous publications describe genetic mapping of specific cDNA clones using the methodology outlined above or variations thereof. For example, F2 intercross populations, backcross populations, randomly mated populations, near isogenic lines, and other sets of individuals may be used for mapping. Such methodologies are well known to those skilled in the art.

[0196] The nucleic acid probes may also be used for physical mapping (i.e., placement of sequences on physical maps; see Hoheisel et al. In: Non-mammalian Genomic Analysis: A Practical Guide, Academic press 1996, pp. 319-346, and references cited therein).

[0197] In another embodiment, the nucleic acid probes may be used in direct fluorescence in situ hybridisation (FISH) mapping (Trask (1991) Trends Genet. 7:149-154). Although current methods of FISH mapping favor use of large clones (several kb to several hundred kb; see Laan et al. (1995) Genome Res. 5:13-20), improvements in sensitivity may allow performance of FISH mapping using shorter probes.

[0198] The present invention further provides a method for enhancing yield-related traits in plants relative to control plants, comprising modulating expression in a plant of a nucleic acid encoding an AP2-2 polypeptide.

[0199] A preferred method for modulating (preferably, increasing) expression of a nucleic acid encoding an AP2-2 polypeptide is by introducing and expressing in a plant a nucleic acid encoding an AP2-2 polypeptide.

[0200] The term “AP2-2 polypeptide” as defined herein refers to a transcription factor that classifies as an ERF protein, and more particularly as a member of Group VII of the ERF proteins, according to the definition by Nakano et al. (2006). Group VII of ERF proteins is, besides the presence of a single AP2/ERF domain, which is part of all ERF proteins, also characterised by other motifs, such as CMVII-1 to CMVII-8 (Nakano et al., 2006). These CMVII motifs were delineated based on analysis of Arabidopsis thaliana and Oryza sativa sequences and are part of the Arabidopsis and/or rice sequences (FIG. 2), but may also be present in Group VII ERF proteins of other species.

[0201] The AP2-2 polypeptide useful in the methods of the present invention comprises the conserved sequence

Motif XII(SEQ ID NO: 133):
(R/I/V/L/K)(R/K/Q/D/E/A)(I/L)(R/Y/H)G(A/S/R/K/T/D/
G/H/L/N)(K/T/R/N/G)A(K/R/E)(V/L/P/T)NF(P/V).
Preferably, motif XII is
(SEQ ID NO: 113)
(R/I/K)(R/K/Q/D/A)(I/L)(R/Y/H)G(A/S/R/K/T/D/E/G/H/
L/N)(K/T/R/N/G)A(K/R/E)(V/L/P/T)NF(P/V/A).

[0202] Preferably, the AP2-2 polypeptide useful in the methods of the present invention furthermore also comprises one or more of the following motifs:

Motif XIII (SEQ ID NO: 134):
MCGG(A/S)(I/V/L)(I/L)(S/H/A/Y/G/P/E)(D/G/H/Y/E/
Q/N).
Preferably, motif XIII is
(SEQ ID NO: 134)
MCGG(A/S)I(I/L)(S/H/A/Y)(D/G/H/Y/E).
More preferably motif XIII is
(SEQ ID NO: 134)
MCGG(A/S)I(I/L)(S/H)(D/G/H/E).
Motif XIV (SEQ ID NO: 135)
(K/N/R/S/H/M/Q/P/A/E)(R/K/H/A/G/E/V/P/M)(E/K/A/R/
S/Q/T/V/G/H/P)(R/K/Q/S/G)(K/G/P/S/R/T/A/N)(T/N/R/
S/A/Y/H/G)(L/Q/H/V/R/K/A/P/G)(Y/F)(R/W/K/L/M)G(I/
V)(R/Q/H)(R/Q/W/K)R(P/K/T).
Preferably, motif XIV is:
(SEQ ID NO: 135)
(K/N/R/S/H/M)(R/K/H/A/G/E/V/P)(E/K/A/R/S/Q)(R/K/Q/
S)(K/G/P/S/R/T)(T/N/R/S/A/Y/H/G)(L/Q/H/V/R/K/A/P/
G/F/I)(Y/F/L)(R/W/K/L/M/H)G(I/V)(R/Q/H)(R/Q/W/K)R
(P/K/T).
More preferably, motif XIV is:
(SEQ ID NO: 135)
(K/N/R/S)(R/K/H)(E/K/A/R)(R/K/Q)(K/G/P/S)(T/N/R/S/
A)(L/Q/H/V/R/K)(Y/F)(R/W/K)G(I/V)R(R/Q)RP.
Most preferably, motif XIV is:
(SEQ ID NO: 135)
(K/N)(R/H)KRKNQ(Y/F)RGIRQRP.
Motif XV (SEQ ID NO: 136):
SD(Q/T/E/V)(G/S)SNSF(G/D/E/S/N)(C/S)S(D/E)(F/Y/L)
(G/S)(W/Q/L)(E/G/S)(N/E/D).
Preferably, motif XV is:
(SEQ ID NO: 136)
SD(Q/T)(G/S/A)SNS(F/I)(G/D)(C/S)S(D/E)F(G/S)(W/Q/
L)(E/S)(N/D).
Motif XVI (SEQ ID NO: 137):
(L/I/F/M)W(S/T/N/M)(F/Y/L/I)(D/E/Q/G)(N/D/H/E)(I/
Y/F/S/M/L/V/D/H/N/E/G).
Preferably, motif XVI is
(SEQ ID NO: 137)
(L/I/M)W(S/T/M)(F/Y/L/I)(D/E/Q/G)(N/D/E)(I/Y/F/S/
M/L/V/D).
More preferably, motif XVI is
(SEQ ID NO: 137)
(L/I/M)W(S/M)(F/L/I)D(D/E)(I/M/L/V).
Motif XVII (SEQ ID NO: 138):
(D/E/S)(F/A/W/D)(E/A)(A/D/L)(D/A/G/E)(F/G/L)(N/E/
R/G/Q/W)(E/G/V/D/R)F(E/K/V/Y/G/D/L/I)(V/R/D/S/N/A/
E)(D/G/T/E/R/A/Y/L/F).
Preferably, motif XVII is
(SEQ ID NO: 138)
(D/E/S)(F/A/W/D)(E/A)(A/D)(D/A)(F/G)(E/R/Q/W)(E/G/
D/R)F(E/K/Y/G/D/L/I)(V/R/D/S/N/A/E)(D/G/T/E/R).
Further preferably, motif XVII is
(SEQ ID NO: 138)
(D/E/S)(F/A)(E/A)(A/D)(D/A)F(E/R/Q/W)(E/G/D/R)F(E/
K/Y/G/D)(V/R/D/S/N)(D/G/T/E).
More preferably, motif XVII is
(SEQ ID NO: 138)
(D/E/S)(F/A)(E/A)(A/D)DF(E/R/Q/W)(E/G)F(E/K/Y)(V/
R/D/S)(D/G/T).
Most preferably, motif XVII is
(SEQ ID NO: 128)
(D/E)FEADF(E/R/Q)EF(E/K)(V/R/D)(D/G).

[0203] These motifs were derived mainly from Arabidopsis and rice sequences, therefore, one or more conserved substitutions are allowed in these motifs for AP2-2 sequences from other plant species.

[0204] Furthermore, AP2-2 polypeptides (at least in their native form) may have DNA-binding activity. Tools and techniques for measuring DNA-binding activity are well known in the art.

[0205] The terms “domain” and “motif” are defined in the “definitions” section herein. Specialist databases exist for the identification of domains. Examples are given in the “definitions” section herein.

[0206] Analysis of the polypeptide sequence of SEQ ID NO: 132 in the SMART database, revealed there to be an AP2 domain (SMART entry SM00380, FIG. 2). This domain is plant specific and is known to play a role in protein-DNA interactions (binds to the GCC-box, essential for the response to ethylene).

[0207] The present invention is illustrated by transforming plants with the nucleic acid sequence represented by SEQ ID NO: 131, encoding the polypeptide sequence of SEQ ID NO: 132. However, performance of the invention is not restricted to these sequences; the methods of the invention may advantageously be performed using any AP2-2-encoding nucleic acid or AP2-2 polypeptides as defined herein.

[0208] Examples of nucleic acids encoding AP2-2 polypeptides are given in Table 14 of Example 9 herein. Such nucleic acids are useful in performing the methods of the invention. The amino acid sequences given in Table 14 of Example 9 are example sequences of orthologues and paralogues of the AP2-2 polypeptides represented by SEQ ID NO: 132, the terms “orthologues” and “paralogues” being as defined herein. Further orthologues and paralogues may readily be identified by performing a so-called reciprocal blast search.

[0209] The invention also provides hitherto unknown AP2-2-encoding nucleic acids and AP2-2 polypeptides.

[0210] According to a further embodiment of the present invention, there is therefore provided an isolated nucleic acid molecule comprising:

(i) a nucleic acid represented by one of SEQ ID NO: 341, SEQ ID NO: 343, or SEQ ID NO: 345;
(ii) the complement of a nucleic acid represented by one of SEQ ID NO: 341, SEQ ID NO: 343, or SEQ ID NO: 345;
(iii) a nucleic acid encoding a POI polypeptide having, in increasing order of preference, at least 50%, 55%, 60%, 65%, 70%, 75%, 80%, 85%, 90%, 95%, 96%, 97%, 98%, 99% or more sequence identity to the amino acid sequence represented by one of SEQ ID NO: 342, SEQ ID NO: 344, or SEQ ID NO: 346.

[0211] According to a further embodiment of the present invention, there is also provided an isolated polypeptide comprising:

(i) an amino acid sequence represented by one of SEQ ID NO: 342, SEQ ID NO: 344, or SEQ ID NO: 346;
(ii) an amino acid sequence having, in increasing order of preference, at least 50%, 55%, 60%, 65%, 70%, 75%, 80%, 85%, 90%, 95%, 96%, 97%, 98%, 99% or more sequence identity to the amino acid sequence represented by one of SEQ ID NO: 342, SEQ ID NO: 344, or SEQ ID NO: 346;
(iii) derivatives of any of the amino acid sequences given in (i) or (ii) above.

[0212] Nucleic acid variants may also be useful in practising the methods of the invention. Examples of such variants include nucleic acids encoding homologues and derivatives of any one of the amino acid sequences given in Table 14 of Example 9, the terms “homologue” and “derivative” being as defined herein. Also useful in the methods of the invention are nucleic acids encoding homologues and derivatives of orthologues or paralogues of any one of the amino acid sequences given in Table 14 of Example 9.

[0213] Homologues and derivatives useful in the methods of the present invention have substantially the same biological and functional activity as the unmodified protein from which they are derived.

[0214] Further nucleic acid variants useful in practising the methods of the invention include portions of nucleic acids encoding AP2-2 polypeptides, nucleic acids hybridising to nucleic acids encoding AP2-2 polypeptides, splice variants of nucleic acids encoding AP2-2 polypeptides, allelic variants of nucleic acids encoding AP2-2 polypeptides and variants of nucleic acids encoding AP2-2 polypeptides obtained by gene shuffling. The terms hybridising sequence, splice variant, allelic variant and gene shuffling are as described herein.

[0215] Nucleic acids encoding AP2-2 polypeptides need not be full-length nucleic acids, since performance of the methods of the invention does not rely on the use of full-length nucleic acid sequences. According to the present invention, there is provided a method for enhancing yield-related traits in plants, comprising introducing and expressing in a plant a portion of any one of the nucleic acid sequences given in Table 14 of Example 9, or a portion of a nucleic acid encoding an orthologue, paralogue or homologue of any of the amino acid sequences given in Table 14 of Example 9.

[0216] A portion of a nucleic acid may be prepared, for example, by making one or more deletions to the nucleic acid. The portions may be used in isolated form or they may be fused to other coding (or non-coding) sequences in order to, for example, produce a protein that combines several activities. When fused to other coding sequences, the resultant polypeptide produced upon translation may be bigger than that predicted for the protein portion.

[0217] Portions useful in the methods of the invention, encode an AP2-2 polypeptide as defined herein, and have substantially the same biological activity as the amino acid sequences given in Table 14 of Example 9. Preferably, the portion is a portion of any one of the nucleic acids given in Table 14 of Example 9, or is a portion of a nucleic acid encoding an orthologue or paralogue of any one of the amino acid sequences given in Table 14 of Example 9. Preferably the portion is, in increasing order of preference at least 600, 800, 900 or 1000 consecutive nucleotides in length, the consecutive nucleotides being of any one of the nucleic acid sequences given in Table 14 of Example 9, or of a nucleic acid encoding an orthologue or paralogue of any one of the amino acid sequences given in Table 14 of Example 9. Most preferably the portion is a portion of the nucleic acid of SEQ ID NO: 131. Preferably, the portion encodes an amino acid sequence comprising (any one or more of the domains or motifs defined herein). Preferably, the portion encodes an amino acid sequence which, when used in the construction of a phylogenetic tree, tends to cluster with the group of AP2-2 polypeptides comprising the amino acid sequence represented by SEQ ID NO: 132 rather than with any other group.

[0218] Another nucleic acid variant useful in the methods of the invention is a nucleic acid capable of hybridising, under reduced stringency conditions, preferably under stringent conditions, with a nucleic acid encoding an AP2-2 polypeptide as defined herein, or with a portion as defined herein.

[0219] According to the present invention, there is provided a method for enhancing yield-related traits in plants, comprising introducing and expressing in a plant a nucleic acid capable of hybridizing to any one of the nucleic acids given in Table 14 of Example 9, or comprising introducing and expressing in a plant a nucleic acid capable of hybridising to a nucleic acid encoding an orthologue, paralogue or homologue of any of the nucleic acid sequences given in Table 14 of Example 9.

[0220] Hybridising sequences useful in the methods of the invention encode an AP2-2 polypeptide as defined herein, and have substantially the same biological activity as the amino acid sequences given in Table 14 of Example 9. Preferably, the hybridising sequence is capable of hybridising to any one of the nucleic acids given in Table 14 of Example 9, or to a portion of any of these sequences, a portion being as defined above, or wherein the hybridising sequence is capable of hybridising to a nucleic acid encoding an orthologue or paralogue of any one of the amino acid sequences given in Table 14 of Example 9. Most preferably, the hybridising sequence is capable of hybridising to a nucleic acid as represented by SEQ ID NO: 131 or to a portion thereof. Preferably, the hybridising sequence encodes an amino acid sequence comprising any one or more of the motifs or domains as defined herein. Preferably, the hybridising sequence encodes an amino acid sequence which, when used in the construction of a phylogenetic tree, tends to cluster with the group of AP2-2 polypeptides comprising the amino acid sequence represented by SEQ ID NO: 132 rather than with any other group.

[0221] Another nucleic acid variant useful in the methods of the invention is a splice variant encoding an AP2-2 polypeptide as defined hereinabove, a splice variant being as defined herein.

[0222] According to the present invention, there is provided a method for enhancing yield-related traits in plants, comprising introducing and expressing in a plant a splice variant of any one of the nucleic acid sequences given in Table 14 of Example 9, or a splice variant of a nucleic acid encoding an orthologue, paralogue or homologue of any of the amino acid sequences given in Table 14 of Example 9.

[0223] Preferred splice variants are splice variants of a nucleic acid represented by SEQ ID NO: 131, or a splice variant of a nucleic acid encoding an orthologue or paralogue of SEQ ID NO: 132. Preferably, the amino acid sequence encoded by the splice variant comprises any one or more of the motifs or domains as defined herein. Preferably, the amino acid sequence encoded by the splice variant, when used in the construction of a phylogenetic tree, tends to cluster with the group of AP2-2 polypeptides comprising the amino acid sequence represented by SEQ ID NO: 132 rather than with any other group.

[0224] Another nucleic acid variant useful in performing the methods of the invention is an allelic variant of a nucleic acid encoding an AP2-2 polypeptide as defined hereinabove, an allelic variant being as defined herein.

[0225] According to the present invention, there is provided a method for enhancing yield-related traits in plants, comprising introducing and expressing in a plant an allelic variant of any one of the nucleic acids given in Table 14 of Example 9, or comprising introducing and expressing in a plant an allelic variant of a nucleic acid encoding an orthologue, paralogue or homologue of any of the amino acid sequences given in Table 14 of Example 9.

[0226] The allelic variants useful in the methods of the present invention have substantially the same biological activity as the AP2-2 polypeptide of SEQ ID NO: 132 and any of the amino acids depicted in Table 14 of Example 9. Allelic variants exist in nature, and encompassed within the methods of the present invention is the use of these natural alleles. Preferably, the allelic variant is an allelic variant of SEQ ID NO: 131 or an allelic variant of a nucleic acid encoding an orthologue or paralogue of SEQ ID NO: 132. Preferably, the amino acid encoded by the allelic variant comprises any one or more of the motifs or domains as defined herein. Preferably, the amino acid sequence encoded by the allelic variant, when used in the construction of a phylogenetic tree, tends to cluster with the group of AP2-2 polypeptides comprising the amino acid sequence represented by SEQ ID NO: 132 rather than with any other group.

[0227] Gene shuffling or directed evolution may also be used to generate variants of nucleic acids encoding AP2-2 polypeptides as defined above; the term “gene shuffling” being as defined herein.

[0228] According to the present invention, there is provided a method for enhancing yield-related traits in plants, comprising introducing and expressing in a plant a variant of any one of the nucleic acid sequences given in Table 14 of Example 9, or comprising introducing and expressing in a plant a variant of a nucleic acid encoding an orthologue, paralogue or homologue of any of the amino acid sequences given in Table 14 of Example 9, which variant nucleic acid is obtained by gene shuffling.

[0229] Preferably, the variant nucleic acid obtained by gene shuffling encodes an amino acid sequence comprising any one or more of the motifs or domains as defined herein. Preferably, the amino acid sequence encoded by the variant nucleic acid obtained by gene shuffling, when used in the construction of a phylogenetic tree, tends to cluster with the group of AP2-2 polypeptides comprising the amino acid sequence represented by SEQ ID NO: 132 rather than with any other group.

[0230] Furthermore, nucleic acid variants may also be obtained by site-directed mutagenesis. Several methods are available to achieve site-directed mutagenesis, the most common being PCR based methods (Current Protocols in Molecular Biology. Wiley Eds.).

[0231] Nucleic acids encoding AP2-2 polypeptides may be derived from any natural or artificial source. The nucleic acid may be modified from its native form in composition and/or genomic environment through deliberate human manipulation. Preferably the AP2-2 polypeptide-encoding nucleic acid is from a plant, further preferably from a dicotyledonous plant, more preferably from the family Poaceae, more preferably from the genus Oryza, most preferably from Oryza sativa.

[0232] Performance of the methods of the invention gives plants having enhanced yield-related traits. In particular, performance of the methods of the invention gives plants having increased yield, especially increased seed yield relative to control plants. The terms “yield” and “seed yield” are described in more detail in the “definitions” section herein. However it should be noted that the term “yield-related traits” does not encompass the metabolite content of plant cells and that the enhanced yield-related traits are not the result of increased stress resistance.

[0233] The present invention provides a method for increasing yield, especially seed yield of plants, relative to control plants, which method comprises modulating expression, preferably increasing expression, in a plant of a nucleic acid encoding an AP2-2 polypeptide as defined herein.

[0234] According to a preferred feature of the present invention, performance of the methods of the invention gives plants having an increased growth rate relative to control plants. Therefore, according to the present invention, there is provided a method for increasing the growth rate of plants, which method comprises modulating expression, preferably increasing expression, in a plant of a nucleic acid encoding an AP2-2 polypeptide as defined herein.

[0235] Performance of the methods of the invention gives plants grown under non-stress conditions or under mild drought conditions increased yield relative to suitable control plants grown under comparable conditions. Therefore, according to the present invention, there is provided a method for increasing yield in plants grown under non-stress conditions, which method comprises increasing expression in a plant of a nucleic acid encoding an AP2-2 polypeptide.

[0236] Performance of the methods of the invention gives plants grown under conditions of nutrient deficiency, particularly under conditions of nitrogen deficiency, increased yield relative to control plants grown under comparable conditions. Therefore, according to the present invention, there is provided a method for increasing yield in plants grown under conditions of nutrient deficiency, which method comprises increasing expression in a plant of a nucleic acid encoding a POI polypeptide. Nutrient deficiency may result from a lack of nutrients such as nitrogen, phosphates and other phosphorous-containing compounds, potassium, calcium, cadmium, magnesium, manganese, iron and boron, amongst others.

[0237] The present invention encompasses plants or parts thereof (including seeds) obtainable by the methods according to the present invention. The plants or parts thereof comprise a nucleic acid transgene encoding an AP2-2 polypeptide as defined above.

[0238] The invention also provides genetic constructs and vectors to facilitate introduction and/or expression in plants of nucleic acids encoding AP2-2 polypeptides. The gene constructs may be inserted into vectors, which may be commercially available, suitable for transforming into plants and suitable for expression of the gene of interest in the transformed cells. The invention also provides use of a gene construct as defined herein in the methods of the invention.

[0239] More specifically, the present invention provides a construct comprising:
[0240] (a) a nucleic acid encoding an AP2-2 polypeptide as defined above;
[0241] (b) one or more control sequences capable of driving expression of the nucleic acid sequence of (a); and optionally
[0242] (c) a transcription termination sequence.

[0243] The term “control sequence” and “termination sequence” are as defined herein.

[0244] Plants are transformed with a vector comprising any of the nucleic acids described above. The skilled artisan is well aware of the genetic elements that must be present on the vector in order to successfully transform, select and propagate host cells containing the sequence of interest. The sequence of interest is operably linked to one or more control sequences (at least to a promoter).

[0245] Advantageously, any type of promoter may be used to drive expression of the nucleic acid sequence. A constitutive promoter is particularly useful in the methods of the invention, preferably the constitutive promoter is a strong constitutive promoters. It should be clear that the applicability of the present invention is not restricted to the AP2-2 polypeptide-encoding nucleic acid represented by SEQ ID NO: 131, nor is the applicability of the invention restricted to expression of an AP2-2 polypeptide-encoding nucleic acid when driven by a constitutive promoter.

[0246] The constitutive promoter is preferably a GOS2 promoter, more preferably the rice GOS2 promoter. See Table 2a in the “definitions” section herein for further examples of constitutive promoters.

[0247] Other control sequences (besides promoter, enhancer, silencer, intron sequences, 3′UTR and/or 5′UTR regions) may be protein and/or RNA stabilizing elements. Such sequences would be known or may readily be obtained by a person skilled in the art.

[0248] The genetic constructs of the invention may further include an origin of replication sequence that is required for maintenance and/or replication in a specific cell type. One example is when a genetic construct is required to be maintained in a bacterial cell as an episomal genetic element (e.g. plasmid or cosmid molecule). Preferred origins of replication include, but are not limited to, the f1-ori and colE1.

[0249] For the detection of the successful transfer of the nucleic acid sequences as used in the methods of the invention and/or selection of transgenic plants comprising these nucleic acids, it is advantageous to use marker genes (or reporter genes). Therefore, the genetic construct may optionally comprise a selectable marker gene. Selectable markers are described in more detail in the “definitions” section herein. The marker genes may be removed or excised from the transgenic cell once they are no longer needed. Techniques for marker removal are known in the art, useful techniques are described above in the definitions section.

[0250] The invention also provides a method for the production of transgenic plants having enhanced yield-related traits relative to control plants, comprising introduction and expression in a plant of any nucleic acid encoding an AP2-2 polypeptide as defined hereinabove.

[0251] More specifically, the present invention provides a method for the production of transgenic plants having increased yield, which method comprises:
[0252] (i) introducing and expressing in a plant or plant cell an AP2-2 polypeptide-encoding nucleic acid; and
[0253] (ii) cultivating the plant cell under conditions promoting plant growth and development.

[0254] The nucleic acid may be introduced directly into a plant cell or into the plant itself (including introduction into a tissue, organ or any other part of a plant). According to a preferred feature of the present invention, the nucleic acid is preferably introduced into a plant by transformation. The term “transformation” is described in more detail in the “definitions” section herein.

[0255] The genetically modified plant cells can be regenerated via all methods with which the skilled worker is familiar. Suitable methods can be found in the abovementioned publications by S. D. Kung and R. Wu, Potrykus or Hofgen and Willmitzer.

[0256] Generally after transformation, plant cells or cell groupings are selected for the presence of one or more markers which are encoded by plant-expressible genes co-transferred with the gene of interest, following which the transformed material is regenerated into a whole plant. To select transformed plants, the plant material obtained in the transformation is, as a rule, subjected to selective conditions so that transformed plants can be distinguished from untransformed plants. For example, the seeds obtained in the above-described manner can be planted and, after an initial growing period, subjected to a suitable selection by spraying. A further possibility consists in growing the seeds, if appropriate after sterilization, on agar plates using a suitable selection agent so that only the transformed seeds can grow into plants. Alternatively, the transformed plants are screened for the presence of a selectable marker such as the ones described above.

[0257] Following DNA transfer and regeneration, putatively transformed plants may also be evaluated, for instance using Southern analysis, for the presence of the gene of interest, copy number and/or genomic organisation. Alternatively or additionally, expression levels of the newly introduced DNA may be monitored using Northern and/or Western analysis, both techniques being well known to persons having ordinary skill in the art.

[0258] The generated transformed plants may be propagated by a variety of means, such as by clonal propagation or classical breeding techniques. For example, a first generation (or T1) transformed plant may be selfed and homozygous second-generation (or T2) transformants selected, and the T2 plants may then further be propagated through classical breeding techniques. The generated transformed organisms may take a variety of forms. For example, they may be chimeras of transformed cells and non-transformed cells; clonal transformants (e.g., all cells transformed to contain the expression cassette); grafts of transformed and untransformed tissues (e.g., in plants, a transformed rootstock grafted to an untransformed scion).

[0259] The present invention clearly extends to any plant cell or plant produced by any of the methods described herein, and to all plant parts and propagules thereof. The present invention extends further to encompass the progeny of a primary transformed or transfected cell, tissue, organ or whole plant that has been produced by any of the aforementioned methods, the only requirement being that progeny exhibit the same genotypic and/or phenotypic characteristic(s) as those produced by the parent in the methods according to the invention.

[0260] The invention also includes host cells containing an isolated nucleic acid encoding an AP2-2 polypeptide as defined hereinabove. Preferred host cells according to the invention are plant cells. Host plants for the nucleic acids or the vector used in the method according to the invention, the expression cassette or construct or vector are, in principle, advantageously all plants, which are capable of synthesizing the polypeptides used in the inventive method.

[0261] The methods of the invention are advantageously applicable to any plant. Plants that are particularly useful in the methods of the invention include all plants which belong to the superfamily Viridiplantae, in particular monocotyledonous and dicotyledonous plants including fodder or forage legumes, ornamental plants, food crops, trees or shrubs. According to a preferred embodiment of the present invention, the plant is a crop plant.

[0262] Examples of crop plants include soybean, sunflower, canola, alfalfa, rapeseed, cotton, tomato, potato and tobacco. Further preferably, the plant is a monocotyledonous plant. Examples of monocotyledonous plants include sugarcane. More preferably the plant is a cereal. Examples of cereals include rice, maize, wheat, barley, millet, rye, triticale, sorghum and oats.

[0263] The invention also extends to harvestable parts of a plant such as, but not limited to seeds, leaves, fruits, flowers, stems, rhizomes, tubers and bulbs. The invention furthermore relates to products derived, preferably directly derived, from a harvestable part of such a plant, such as dry pellets or powders, oil, fat and fatty acids, starch or proteins.

[0264] According to a preferred feature of the invention, the modulated expression is increased expression. Methods for increasing expression of nucleic acids or genes, or gene products, are well documented in the art. Examples of methods for increasing expression are given in the “definitions” section.

[0265] As mentioned above, a preferred method for modulating (preferably, increasing) expression of a nucleic acid encoding an AP2-2 polypeptide is by introducing and expressing in a plant a nucleic acid encoding an AP2-2 polypeptide; however the effects of performing the method, i.e. enhancing yield-related traits may also be achieved using other well known techniques. A description of some of these techniques will now follow.

[0266] The effects of the invention may also be reproduced using the technique of T-DNA activation or TILLING (Targeted Induced Local Lesions In Genomes); for a description of the same see the “definitions” section.

[0267] The effects of the invention may also be reproduced using homologous recombination; for a description of the same see the “definitions” section.

[0268] The present invention also encompasses use of nucleic acids encoding AP2-2 polypeptides as described herein and use of this AP2-2 polypeptide in enhancing any of the aforementioned yield-related traits in plants.

[0269] Nucleic acids encoding AP2-2 polypeptide described herein, or the AP2-2 polypeptides themselves, may find use in breeding programmes in which a DNA marker is identified which may be genetically linked to an AP2-2 polypeptide-encoding gene. The nucleic acids/genes, or the AP2-2 polypeptides themselves may be used to define a molecular marker. This DNA or protein marker may then be used in breeding programmes to select plants having enhanced yield-related traits as defined hereinabove in the methods of the invention.

[0270] Allelic variants of an AP2-2 polypeptide-encoding nucleic acid/gene may also find use in marker-assisted breeding programmes. Such breeding programmes sometimes require introduction of allelic variation by mutagenic treatment of the plants, using for example EMS mutagenesis; alternatively, the programme may start with a collection of allelic variants of so called “natural” origin caused unintentionally. Identification of allelic variants then takes place, for example, by PCR. This is followed by a step for selection of superior allelic variants of the sequence in question and which give increased yield. Selection is typically carried out by monitoring growth performance of plants containing different allelic variants of the sequence in question. Growth performance may be monitored in a greenhouse or in the field. Further optional steps include crossing plants in which the superior allelic variant was identified with another plant. This could be used, for example, to make a combination of interesting phenotypic features.

[0271] Nucleic acids encoding AP2-2 polypeptides may also be used as probes for genetically and physically mapping the genes that they are a part of, and as markers for traits linked to those genes. Such information may be useful in plant breeding in order to develop lines with desired phenotypes. Such use of AP2-2 polypeptide-encoding nucleic acids requires only a nucleic acid sequence of at least 15 nucleotides in length. The AP2-2 polypeptide-encoding nucleic acids may be used as restriction fragment length polymorphism (RFLP) markers. Southern blots (Sambrook J, Fritsch E F and Maniatis T (1989) Molecular Cloning, A Laboratory Manual) of restriction-digested plant genomic DNA may be probed with the AP2-2-encoding nucleic acids. The resulting banding patterns may then be subjected to genetic analyses using computer programs such as MapMaker (Lander et al. (1987) Genomics 1: 174-181) in order to construct a genetic map. In addition, the nucleic acids may be used to probe Southern blots containing restriction endonuclease-treated genomic DNAs of a set of individuals representing parent and progeny of a defined genetic cross. Segregation of the DNA polymorphisms is noted and used to calculate the position of the AP2-2 polypeptide-encoding nucleic acid in the genetic map previously obtained using this population (Botstein et al. (1980) Am. J. Hum. Genet. 32:314-331).

[0272] The production and use of plant gene-derived probes for use in genetic mapping is described in Bernatzky and Tanksley (1986) Plant Mol. Biol. Reporter 4: 37-41. Numerous publications describe genetic mapping of specific cDNA clones using the methodology outlined above or variations thereof. For example, F2 intercross populations, backcross populations, randomly mated populations, near isogenic lines, and other sets of individuals may be used for mapping. Such methodologies are well known to those skilled in the art.

[0273] The nucleic acid probes may also be used for physical mapping (i.e., placement of sequences on physical maps; see Hoheisel et al. In: Non-mammalian Genomic Analysis: A Practical Guide, Academic press 1996, pp. 319-346, and references cited therein).

[0274] In another embodiment, the nucleic acid probes may be used in direct fluorescence in situ hybridisation (FISH) mapping (Trask (1991) Trends Genet. 7:149-154). Although current methods of FISH mapping favour use of large clones (several kb to several hundred kb; see Laan et al. (1995) Genome Res. 5:13-20), improvements in sensitivity may allow performance of FISH mapping using shorter probes.

[0275] A variety of nucleic acid amplification-based methods for genetic and physical mapping may be carried out using the nucleic acids. Examples can be found in the “definitions” section herein.

[0276] The present invention further provides a method for enhancing yield-related traits in plants relative to control plants, comprising modulating expression in a plant of a nucleic acid encoding an AP2-70-like polypeptide.

[0277] The invention also provides hitherto unknown AP2-70-like-encoding nucleic acids and AP2-70-like polypeptides.

[0278] According to a further embodiment of the present invention, there is therefore provided an isolated nucleic acid molecule comprising:
[0279] (i) a nucleic acid represented by SEQ ID NO: 257;
[0280] (ii) the complement of a nucleic acid represented by SEQ ID NO: 257;
[0281] (iii) a nucleic acid encoding an AP2-70-like polypeptide having, in increasing order of preference, at least 50%, 55%, 60%, 65%, 70%, 75%, 80%, 85%, 90%, 95%, 96%, 97%, 98%, 99% or more sequence identity to the amino acid sequence represented by SEQ ID NO: 258, and having in increasing order of preference at least 50%, 55%, 60%, 65%, 70%, 75%, 80%, 85%, 90%, 95%, 96%, 97%, 98%, 99% or more sequence identity to SEQ ID NO: 331: PFLMQWLNLLPLPVLDSSSWCPEHFHNSESDALP (which represents the C-terminal region of SEQ ID NO: 258).

[0282] According to a further embodiment of the present invention, there is also provided an isolated polypeptide comprising:
[0283] (i) an amino acid sequence represented by SEQ ID NO: 258;
[0284] (ii) an amino acid sequence having, in increasing order of preference, at least 50%, 55%, 60%, 65%, 70%, 75%, 80%, 85%, 90%, 95%, 96%, 97%, 98%, 99% or more sequence identity to the amino acid sequence represented by SEQ ID NO: 258, and having in increasing order of preference at least 50%, 55%, 60%, 65%, 70%, 75%, 80%, 85%, 90%, 95%, 96%, 97%, 98%, 99% or more sequence identity to SEQ ID NO: 331: PFLMQWLNLLPLPVLDSSSWCPEHFHNSESDALP (which represents the C-terminal region of SEQ ID NO: 258);
[0285] (iii) derivatives of any of the amino acid sequences given in (i) or (ii) above.

[0286] A preferred method for modulating (preferably, increasing) expression of a nucleic acid encoding an AP2-70-like polypeptide is by introducing and expressing in a plant a nucleic acid encoding an AP2-70-like polypeptide.

[0287] Any reference hereinafter to a “protein useful in the methods of the invention” is taken to mean an AP2-70-like polypeptide as defined herein. Any reference hereinafter to a “nucleic acid useful in the methods of the invention” is taken to mean a nucleic acid capable of encoding such an AP2-70-like polypeptide. The nucleic acid to be introduced into a plant (and therefore useful in performing the methods of the invention) is any nucleic acid encoding the type of protein which will now be described, hereafter also named “AP2-70-like nucleic acid” or “AP2-70-like gene”.

[0288] AP2-70-like polypeptides as defined below fall within Group Ib (A-6) according to the classification of Nakano et al., 2006.

[0289] An “AP2-70-like polypeptide” as defined herein refers to any polypeptide comprising the following:
[0290] (i) An AP2 DNA-binding domain as represented by SEQ ID NO: 332: YRGVRQRHWGKWVAEIRLPRNRTRLWLGTFDTAEEAALAYDSAAFRLRGESA RLNF, or a domain having in increasing order of preference at least 50%, 55%, 60%, 65%, 70%, 75%, 80%, 85%, 90%, 95% or more sequence identity to the domain represented by SEQ ID NO: 332; and
[0291] (ii) Having in increasing order of preference at least 50%, 55%, 60%, 65%, 70%, 75%, 80%, 85%, 90%, 95% or more sequence identity to the (Oryza sativa) polypeptide sequence represented by SEQ ID NO: 258; and
[0292] (iii) Comprising Motif XVIII represented by SEQ ID NO: 333: RLPXNX¹RXRXWLGT F/Y D/E T/S, where X is any amino acid and X¹ is zero, one or more, and up to 30, gaps; and
[0293] (iv) Comprising Motif XIX represented by SEQ ID NO: 334: RG D/E.

[0294] In the AP2 DNA-binding domain described above under (i), YRG and LAYD, as highlighted below, are preferred specific boxes for DNA-binding.

SEQ ID NO: 332: YRGVRQRHWGKWVAEIRLPRNRTRLWLGTFDTAEEAALAYDSAAFRLRGESARLNF.

[0295] Preferably, the AP2 DNA-binding domain described above under (i) comprises at least residues LPRNRTRLWLGTFDT (part of SEQ ID NO: 332).

[0296] Motif XVIII (SEQ ID NO: 333) is preferably RLP K/R/Q NX¹R TN/M R L/V WLGT F/Y D/E T/S, where X¹ is zero, one or more, and up to 30, gaps.

[0297] More preferably, Motif XVIII (SEQ ID NO: 333) is RLPRNX¹RTRLWLGTFDT, wherein X¹ is zero, one or more, and up to 30, gaps.

[0298] AP2-70 polypeptides as defined herein may also comprise one or more of the following motifs:

Motif XX/SEQ ID NO: 335: WDESESFLLHKYPSLEIDWDAILS, or a motif having in increasing order of preference at least 50%, 55%, 60%, 65%, 70%, 75%, 80%, 85%, 90%, 95% or more sequence identity to Motif XX. Adapted from Nakano et al., 2006 (CMI-1).
Motif XXI/SEQ ID NO: 336: GPPLHAAVDAKLHAICH, or a motif having in increasing order of preference at least 50%, 55%, 60%, 65%, 70%, 75%, 80%, 85%, 90%, 95% or more sequence identity to Motif XXI. Adapted from Nakano et al., 2006 (CMI-2).
Motif XXII/SEQ ID NO: 337: GANYLTPAQVLHVQAQLQRLRRP, or a motif having in increasing order of preference at least 50%, 55%, 60%, 65%, 70%, 75%, 80%, 85%, 90%, 95% or more sequence identity to Motif XXII. Adapted from Nakano et al., 2006 (CMI-3).
Motif XXIII/SEQ ID NO: 338: VDSKELMGALAPSMVSFSYPCSEQSASS, or a motif having in increasing order of preference at least 50%, 55%, 60%, 65%, 70%, 75%, 80%, 85%, 90%, 95% or more sequence identity to Motif XXIII. Adapted from Nakano et al., 2006 (CMI-4).

[0299] Any of Motifs XVIII and XX to XXIII described above may comprise one, two or three conservative and/or non-conservative change and/or deletion at any position.

[0300] The term “domain” and “motif” is defined in the “definitions” section herein. Specialist databases exist for the identification of domains. Examples are given in the “definitions” section herein.

[0301] Furthermore, AP2-70-like polypeptides (at least in their native form) typically have DNA-binding activity. Tools and techniques for measuring DNA-binding activity are well known in the art.

[0302] The present invention is illustrated by transforming plants with the nucleic acid sequence represented by SEQ ID NO: 257, encoding the polypeptide sequence of SEQ ID NO: 258. However, performance of the invention is not restricted to these sequences; the methods of the invention may advantageously be performed using any AP2-70-like-encoding nucleic acid or AP2-70-like polypeptide as defined herein.

[0303] Examples of nucleic acids encoding AP2-70-like polypeptides are given in Table 18 of Example 18 herein. Such nucleic acids are useful in performing the methods of the invention. The amino acid sequences given in Table 18 of Example 18 are example sequences of orthologues and paralogues of the AP2-70-like polypeptide represented by SEQ ID NO: 258, the terms “orthologues” and “paralogues” being as defined herein.

[0304] Nucleic acid variants may also be useful in practising the methods of the invention. Examples of such variants include nucleic acids encoding homologues and derivatives of any one of the amino acid sequences given in Table 18 of Example 18, the terms “homologue” and “derivative” being as defined herein. Also useful in the methods of the invention are nucleic acids encoding homologues and derivatives of orthologues or paralogues of any one of the amino acid sequences given in Table 18 of Example 18. Homologues and derivatives useful in the methods of the present invention have substantially the same biological and functional activity as the unmodified protein from which they are derived.

[0305] Further nucleic acid variants useful in practising the methods of the invention include portions of nucleic acids encoding AP2-70-like polypeptides, nucleic acids hybridising to nucleic acids encoding AP2-70-like polypeptides, splice variants of nucleic acids encoding AP2-70-like polypeptides, allelic variants of nucleic acids encoding AP2-70-like polypeptides and variants of nucleic acids encoding AP2-70-like polypeptides obtained by gene shuffling. The terms hybridising sequence, splice variant, allelic variant and gene shuffling are as described herein.

[0306] Nucleic acids encoding AP2-70-like polypeptides need not be full-length nucleic acids, since performance of the methods of the invention does not rely on the use of full-length nucleic acid sequences. According to the present invention, there is provided a method for enhancing yield-related traits in plants, comprising introducing and expressing in a plant a portion of any one of the nucleic acid sequences given in Table 18 of Example 18, or a portion of a nucleic acid encoding an orthologue, paralogue or homologue of any of the amino acid sequences given in Table 18 of Example 18.

[0307] A portion of a nucleic acid may be prepared, for example, by making one or more deletions to the nucleic acid. The portions may be used in isolated form or they may be fused to other coding (or non-coding) sequences in order to, for example, produce a protein that combines several activities. When fused to other coding sequences, the resultant polypeptide produced upon translation may be bigger than that predicted for the protein portion.

[0308] Portions useful in the methods of the invention, encode an AP2-70-like polypeptide as defined herein, and have substantially the same biological activity as the amino acid sequences given in Table 18 of Example 18. Preferably, the portion is a portion of any one of the nucleic acids given in Table 18 of Example 18, or is a portion of a nucleic acid encoding an orthologue or paralogue of any one of the amino acid sequences given in Table 18 of Example 18. Preferably the portion is, in increasing order of preference at least 600, 650, 700, 750 consecutive nucleotides in length, the consecutive nucleotides being of any one of the nucleic acid sequences given in Table 18 of Example 18, or of a nucleic acid encoding an orthologue or paralogue of any one of the amino acid sequences given in Table 18 of Example 18. Most preferably the portion is a portion of the nucleic acid of SEQ ID NO: 257. Preferably, the portion encodes an amino acid sequence which when used in the construction of a phylogenetic tree, such as the one depicted in Figures. 3 and 4, tends to cluster with the group of AP2-70-like polypeptides (Group I (A-6), specifically Group Ib: see Nakanao et al., 2006 for classification) comprising the amino acid sequence represented by SEQ ID NO: 258 rather than with any other group.

[0309] Another nucleic acid variant useful in the methods of the invention is a nucleic acid capable of hybridising, under reduced stringency conditions, preferably under stringent conditions, with a nucleic acid encoding an AP2-70-like polypeptide as defined herein, or with a portion as defined herein.

[0310] According to the present invention, there is provided a method for enhancing yield-related traits in plants, comprising introducing and expressing in a plant a nucleic acid capable of hybridizing to any one of the nucleic acids given in Table 18 of Example 18, or comprising introducing and expressing in a plant a nucleic acid capable of hybridising to a nucleic acid encoding an orthologue, paralogue or homologue of any of the nucleic acid sequences given in Table 18 of Example 18.

[0311] Hybridising sequences useful in the methods of the invention encode an AP2-70-like polypeptide as defined herein, and have substantially the same biological activity as the amino acid sequences given in Table 18 of Example 18. Preferably, the hybridising sequence is capable of hybridising to any one of the nucleic acids given in Table 18 of Example 18, or to a portion of any of these sequences, a portion being as defined above, or wherein the hybridising sequence is capable of hybridising to a nucleic acid encoding an orthologue or paralogue of any one of the amino acid sequences given in Table 18 of Example 18. Most preferably, the hybridising sequence is capable of hybridising to a nucleic acid as represented by SEQ ID NO: 257 or to a portion thereof.

[0312] Preferably, the hybridising sequence encodes an amino acid sequence which when used in the construction of a phylogenetic tree, such as the one depicted in FIGS. 3 and 4, tends to cluster with the group of AP2-70-like polypeptides (Group I(A-6), specifically Group Ib: see Nakanao et al., 2006 for classification) comprising the amino acid sequence represented by SEQ ID NO: 258 rather than with any other group.

[0313] Another nucleic acid variant useful in the methods of the invention is a splice variant encoding an AP2-70-like polypeptide as defined hereinabove, a splice variant being as defined herein.

[0314] According to the present invention, there is provided a method for enhancing yield-related traits in plants, comprising introducing and expressing in a plant a splice variant of any one of the nucleic acid sequences given in Table 18 of Example 18, or a splice variant of a nucleic acid encoding an orthologue, paralogue or homologue of any of the amino acid sequences given in Table 18 of Example 18.

[0315] Preferred splice variants are splice variants of a nucleic acid represented by SEQ ID NO: 257, or a splice variant of a nucleic acid encoding an orthologue or paralogue of SEQ ID NO: 258. Preferably, the amino acid sequence encoded by the splice variant, when used in the construction of a phylogenetic tree, such as the one depicted in FIGS. 3 and 4, tends to cluster with the group of AP2-70-like polypeptides (Group I(A-6), specifically Group Ib: see Nakanao et al., 2006 for classification) comprising the amino acid sequence represented by SEQ ID NO: 258 rather than with any other group.

[0316] Another nucleic acid variant useful in performing the methods of the invention is an allelic variant of a nucleic acid encoding an AP2-70-like polypeptide as defined hereinabove, an allelic variant being as defined herein.

[0317] According to the present invention, there is provided a method for enhancing yield-related traits in plants, comprising introducing and expressing in a plant an allelic variant of any one of the nucleic acids given in Table 18 of Example 18, or comprising introducing and expressing in a plant an allelic variant of a nucleic acid encoding an orthologue, paralogue or homologue of any of the amino acid sequences given in Table 18 of Example 18.

[0318] The allelic variants useful in the methods of the present invention have substantially the same biological activity as the AP2-70-like polypeptide of SEQ ID NO: 258 and any of the amino acids depicted in Table 18 of Example 18. Allelic variants exist in nature, and encompassed within the methods of the present invention is the use of these natural alleles. Preferably, the allelic variant is an allelic variant of SEQ ID NO: 257 or an allelic variant of a nucleic acid encoding an orthologue or paralogue of SEQ ID NO: 258. Preferably, the amino acid sequence encoded by the allelic variant, when used in the construction of a phylogenetic tree, such as the one depicted in FIGS. 3 and 4, tends to cluster with the AP2-70-like polypeptides (Group I(A-6), specifically Group Ib: see Nakanao et al., 2006 for classification) comprising the amino acid sequence represented by SEQ ID NO: 258 rather than with any other group.

[0319] Gene shuffling or directed evolution may also be used to generate variants of nucleic acids encoding AP2-70-like polypeptides as defined above; the term “gene shuffling” being as defined herein.

[0320] According to the present invention, there is provided a method for enhancing yield-related traits in plants, comprising introducing and expressing in a plant a variant of any one of the nucleic acid sequences given in Table 18 of Example 18, or comprising introducing and expressing in a plant a variant of a nucleic acid encoding an orthologue, paralogue or homologue of any of the amino acid sequences given in Table 18 of Example 18, which variant nucleic acid is obtained by gene shuffling.

[0321] Preferably, the amino acid sequence encoded by the variant nucleic acid obtained by gene shuffling, when used in the construction of a phylogenetic tree such as the one depicted in FIGS. 3 and 4, tends to cluster with the group of AP2-70-like polypeptides (Group I(A-6), specifically Group Ib: see Nakanao et al., 2006 for classification) comprising the amino acid sequence represented by SEQ ID NO: 258 rather than with any other group.

[0322] Furthermore, nucleic acid variants may also be obtained by site-directed mutagenesis. Several methods are available to achieve site-directed mutagenesis, the most common being PCR based methods (Current Protocols in Molecular Biology. Wiley Eds.).

[0323] Nucleic acids encoding AP2-70-like polypeptides may be derived from any natural or artificial source. The nucleic acid may be modified from its native form in composition and/or genomic environment through deliberate human manipulation. Preferably the AP2-70-like polypeptide-encoding nucleic acid is from a plant, further preferably from a monocotyledonous plant, more preferably from the family poaceae, most preferably the nucleic acid is from Oryza sativa.

[0324] Performance of the methods of the invention gives plants having enhanced yield-related traits. In particular performance of the methods of the invention gives plants having increased yield, especially increased seed yield relative to control plants. The terms “yield” and “seed yield” are described in more detail in the “definitions” section herein.

[0325] The present invention provides a method for increasing yield, especially seed yield of plants, relative to control plants, which method comprises modulating expression, preferably increasing expression, in a plant of a nucleic acid encoding an AP2-70-like polypeptide as defined herein.

[0326] According to a preferred feature of the present invention, performance of the methods of the invention gives plants having an increased growth rate relative to control plants. Therefore, according to the present invention, there is provided a method for increasing the growth rate of plants, which method comprises modulating expression, preferably increasing expression, in a plant of a nucleic acid encoding an AP2-70-like polypeptide as defined herein.

[0327] Performance of the methods of the invention gives plants grown under non-stress conditions or under mild drought conditions increased yield relative to suitable control plants grown under comparable conditions. Therefore, according to the present invention, there is provided a method for increasing yield in plants grown under non-stress conditions or under mild drought conditions, which method comprises increasing expression in a plant of a nucleic acid encoding an AP2-70-like polypeptide.

[0328] Performance of the methods of the invention gives plants grown under conditions of nutrient deficiency, particularly under conditions of nitrogen deficiency, increased yield relative to control plants grown under comparable conditions. Therefore, according to the present invention, there is provided a method for increasing yield in plants grown under conditions of nutrient deficiency, which method comprises increasing expression in a plant of a nucleic acid encoding an AP2-70-like polypeptide. Nutrient deficiency may result from a lack or excess of nutrients such as nitrogen, phosphates and other phosphorous-containing compounds, potassium, calcium, cadmium, magnesium, manganese, iron and boron, amongst others.

[0329] The present invention encompasses plants or parts thereof (including seeds) obtainable by the methods according to the present invention. The plants or parts thereof comprise a nucleic acid transgene encoding an AP2-70-like polypeptide as defined above.

[0330] The invention also provides genetic constructs and vectors to facilitate introduction and/or expression in plants of nucleic acids encoding AP2-70-like polypeptides. The gene constructs may be inserted into vectors, which may be commercially available, suitable for transforming into plants and suitable for expression of the gene of interest in the transformed cells. The invention also provides use of a gene construct as defined herein in the methods of the invention.

[0331] More specifically, the present invention provides a construct comprising:
[0332] (a) a nucleic acid encoding an AP2-70-like polypeptide as defined above;
[0333] (b) one or more control sequences capable of driving expression of the nucleic acid sequence of (a); and optionally
[0334] (c) a transcription termination sequence.

[0335] Preferably, the nucleic acid encoding an AP2-70-like polypeptide is:
[0336] (i) a nucleic acid represented by SEQ ID NO: 257;
[0337] (ii) the complement of a nucleic acid represented by SEQ ID NO: 257;
[0338] (iv) a nucleic acid encoding an AP2-70-like polypeptide having, in increasing order of preference, at least 50%, 55%, 60%, 65%, 70%, 75%, 80%, 85%, 90%, 95%, 96%, 97%, 98%, 99% or more sequence identity to the amino acid sequence represented by SEQ ID NO: 258, and having in increasing order of preference at least 50%, 55%, 60%, 65%, 70%, 75%, 80%, 85%, 90%, 95%, 96%, 97%, 98%, 99% or more sequence identity to SEQ ID NO: 331: PFLMQWLNLLPLPVLDSSSWCPEHFHNSESDALP (which represents the C-terminal region of SEQ ID NO: 258).

[0339] The term “control sequence” and “termination sequence” are as defined herein.

[0340] Plants are transformed with a vector comprising any of the nucleic acids described above. The skilled artisan is well aware of the genetic elements that must be present on the vector in order to successfully transform, select and propagate host cells containing the sequence of interest. The sequence of interest is operably linked to one or more control sequences (at least to a promoter).

[0341] Advantageously, any type of promoter, whether natural or synthetic, may be used to drive expression of the nucleic acid sequence. A constitutive promoter is particularly useful in the methods. See the “Definitions” section herein for definitions of the various promoter types. Also useful in the methods of the invention is a root-specific promoter.

[0342] It should be clear that the applicability of the present invention is not restricted to the AP2-70-like polypeptide-encoding nucleic acid represented by SEQ ID NO: 257, nor is the applicability of the invention restricted to expression of an AP2-70-like polypeptide-encoding nucleic acid when driven by a constitutive promoter, or when driven by a root-specific promoter.

[0343] The constitutive promoter is preferably a GOS2 promoter, preferably a GOS2 promoter from rice. Further preferably the constitutive promoter is represented by a nucleic acid sequence substantially similar to SEQ ID NO: 39 or SEQ ID NO: 339 most preferably the constitutive promoter is as represented by SEQ ID NO: 39 or SEQ ID NO: 339. See Table 2a in the “Definitions” section herein for further examples of constitutive promoters.

[0344] According to another preferred feature of the invention, the nucleic acid encoding an AP2-70-like polypeptide is operably linked to a root-specific promoter. The root-specific promoter is preferably an RCc3 promoter (Plant Mol Biol. 1995 January; 27(2):237-48), more preferably the RCc3 promoter is from rice, further preferably the RCc3 promoter is represented by a nucleic acid sequence substantially similar to SEQ ID NO: 110 or SEQ ID NO: 340, most preferably the promoter is as represented by SEQ ID NO: 110. Examples of other root-specific promoters which may also be used to perform the methods of the invention are shown in Table 2b herein.

[0345] For the detection of the successful transfer of the nucleic acid sequences as used in the methods of the invention and/or selection of transgenic plants comprising these nucleic acids, it is advantageous to use marker genes (or reporter genes). Therefore, the genetic construct may optionally comprise a selectable marker gene. Selectable markers are described in more detail in the “definitions” section herein.

[0346] The invention also provides a method for the production of transgenic plants having enhanced yield-related traits relative to control plants, comprising introduction and expression in a plant of any nucleic acid encoding an AP2-70-like polypeptide as defined hereinabove.

[0347] More specifically, the present invention provides a method for the production of transgenic plants having increased enhanced yield-related traits, particularly increased (seed) yield, which method comprises:
[0348] (i) introducing and expressing in a plant or plant cell an AP2-70-like polypeptide-encoding nucleic acid; and
[0349] (ii) cultivating the plant cell under conditions promoting plant growth and development.

[0350] The nucleic acid of (i) may be any of the nucleic acids capable of encoding an AP2-70-like polypeptide as defined herein. Preferably, the nucleic acid is:
[0351] (i) a nucleic acid represented by SEQ ID NO: 257;
[0352] (ii) the complement of a nucleic acid represented by SEQ ID NO: 257;
[0353] (iii) a nucleic acid encoding an AP2-70-like polypeptide having, in increasing order of preference, at least 50%, 55%, 60%, 65%, 70%, 75%, 80%, 85%, 90%, 95%, 96%, 97%, 98%, 99% or more sequence identity to the amino acid sequence represented by SEQ ID NO: 258, and having in increasing order of preference at least 50%, 55%, 60%, 65%, 70%, 75%, 80%, 85%, 90%, 95%, 96%, 97%, 98%, 99% or more sequence identity to SEQ ID NO: 331: PFLMQWLNLLPLPVLDSSSWCPEHFHNSESDALP (which represents the C-terminal region of SEQ ID NO: 258).

[0354] The nucleic acid may be introduced directly into a plant cell or into the plant itself (including introduction into a tissue, organ or any other part of a plant). According to a preferred feature of the present invention, the nucleic acid is preferably introduced into a plant by transformation. The term “transformation” is described in more detail in the “definitions” section herein.

[0355] The genetically modified plant cells can be regenerated via all methods with which the skilled worker is familiar. Suitable methods can be found in the abovementioned publications by S. D. Kung and R. Wu, Potrykus or Hofgen and Willmitzer.

[0356] Generally after transformation, plant cells or cell groupings are selected for the presence of one or more markers which are encoded by plant-expressible genes co-transferred with the gene of interest, following which the transformed material is regenerated into a whole plant. To select transformed plants, the plant material obtained in the transformation is, as a rule, subjected to selective conditions so that transformed plants can be distinguished from untransformed plants. For example, the seeds obtained in the above-described manner can be planted and, after an initial growing period, subjected to a suitable selection by spraying. A further possibility consists in growing the seeds, if appropriate after sterilization, on agar plates using a suitable selection agent so that only the transformed seeds can grow into plants. Alternatively, the transformed plants are screened for the presence of a selectable marker such as the ones described above.

[0357] Following DNA transfer and regeneration, putatively transformed plants may also be evaluated, for instance using Southern analysis, for the presence of the gene of interest, copy number and/or genomic organisation. Alternatively or additionally, expression levels of the newly introduced DNA may be monitored using Northern and/or Western analysis, both techniques being well known to persons having ordinary skill in the art.

[0358] The generated transformed plants may be propagated by a variety of means, such as by clonal propagation or classical breeding techniques. For example, a first generation (or T1) transformed plant may be selfed and homozygous second-generation (or T2) transformants selected, and the T2 plants may then further be propagated through classical breeding techniques. The generated transformed organisms may take a variety of forms. For example, they may be chimeras of transformed cells and non-transformed cells; clonal transformants (e.g., all cells transformed to contain the expression cassette); grafts of transformed and untransformed tissues (e.g., in plants, a transformed rootstock grafted to an untransformed scion).

[0359] The present invention clearly extends to any plant cell or plant produced by any of the methods described herein, and to all plant parts and propagules thereof. The present invention extends further to encompass the progeny of a primary transformed or transfected cell, tissue, organ or whole plant that has been produced by any of the aforementioned methods, the only requirement being that progeny exhibit the same genotypic and/or phenotypic characteristic(s) as those produced by the parent in the methods according to the invention.

[0360] The invention also includes host cells containing an isolated nucleic acid encoding a AP2-70-like polypeptide as defined hereinabove. Preferred host cells according to the invention are plant cells. Host plants for the nucleic acids or the vector used in the method according to the invention, the expression cassette or construct or vector are, in principle, advantageously all plants, which are capable of synthesizing the polypeptides used in the inventive method.

[0361] The methods of the invention are advantageously applicable to any plant. Plants that are particularly useful in the methods of the invention include all plants which belong to the superfamily Viridiplantae, in particular monocotyledonous and dicotyledonous plants including fodder or forage legumes, ornamental plants, food crops, trees or shrubs. According to a preferred embodiment of the present invention, the plant is a crop plant. Examples of crop plants include soybean, sunflower, canola, alfalfa, rapeseed, cotton, tomato, potato and tobacco. Further preferably, the plant is a monocotyledonous plant. Examples of monocotyledonous plants include sugarcane. More preferably the plant is a cereal. Examples of cereals include rice, maize, wheat, barley, millet, rye, triticale, sorghum and oats.

[0362] The invention also extends to harvestable parts of a plant such as, but not limited to seeds, leaves, fruits, flowers, stems, rhizomes, tubers and bulbs. The invention furthermore relates to products derived, preferably directly derived, from a harvestable part of such a plant, such as dry pellets or powders, oil, fat and fatty acids, starch or proteins.

[0363] According to a preferred feature of the invention, the modulated expression is increased expression. Methods for increasing expression of nucleic acids or genes, or gene products, are well documented in the art. Examples are given in the “definitions” section herein.

[0364] As mentioned above, a preferred method for modulating (preferably, increasing) expression of a nucleic acid encoding an AP2-70-like polypeptide is by introducing and expressing in a plant a nucleic acid encoding an AP2-70-like polypeptide; however the effects of performing the method, i.e. enhancing yield-related traits may also be achieved using other well known techniques. A description of some of these techniques can be found in the “definitions” section.

[0365] The effects of the invention may also be reproduced using the technique of T-DNA activation or TILLING (Targeted Induced Local Lesions In Genomes); for a description of the same see the “definitions” section.

[0366] The effects of the invention may also be reproduced using homologous recombination; for a description of the same see the “definitions” section.

[0367] The present invention also encompasses use of nucleic acids encoding AP2-70-like polypeptides as described herein and use of these AP2-70-like polypeptide in enhancing any of the aforementioned yield-related traits in plants.

[0368] Nucleic acids encoding AP2-70-like polypeptide described herein, or the AP2-70-like polypeptides themselves, may find use in breeding programmes in which a DNA marker is identified which may be genetically linked to an AP2-70-like polypeptide-encoding gene. The nucleic acids/genes, or the AP2-70-like polypeptides themselves may be used to define a molecular marker. This DNA or protein marker may then be used in breeding programmes to select plants having enhanced yield-related traits as defined hereinabove in the methods of the invention.

[0369] Allelic variants of an AP2-70-like polypeptide-encoding nucleic acid/gene may also find use in marker-assisted breeding programmes. Such breeding programmes sometimes require introduction of allelic variation by mutagenic treatment of the plants, using for example EMS mutagenesis; alternatively, the programme may start with a collection of allelic variants of so called “natural” origin caused unintentionally. Identification of allelic variants then takes place, for example, by PCR. This is followed by a step for selection of superior allelic variants of the sequence in question and which give increased yield. Selection is typically carried out by monitoring growth performance of plants containing different allelic variants of the sequence in question. Growth performance may be monitored in a greenhouse or in the field. Further optional steps include crossing plants in which the superior allelic variant was identified with another plant. This could be used, for example, to make a combination of interesting phenotypic features.

[0370] Nucleic acids encoding AP2-70-like polypeptides may also be used as probes for genetically and physically mapping the genes that they are a part of, and as markers for traits linked to those genes. Such information may be useful in plant breeding in order to develop lines with desired phenotypes. Such use of AP2-70-like polypeptide-encoding nucleic acids requires only a nucleic acid sequence of at least 15 nucleotides in length. The AP2-70-like polypeptide-encoding nucleic acids may be used as restriction fragment length polymorphism (RFLP) markers. Southern blots (Sambrook J, Fritsch E F and Maniatis T (1989) Molecular Cloning, A Laboratory Manual) of restriction-digested plant genomic DNA may be probed with the AP2-70-like-encoding nucleic acids. The resulting banding patterns may then be subjected to genetic analyses using computer programs such as MapMaker (Lander et al. (1987) Genomics 1: 174-181) in order to construct a genetic map. In addition, the nucleic acids may be used to probe Southern blots containing restriction endonuclease-treated genomic DNAs of a set of individuals representing parent and progeny of a defined genetic cross. Segregation of the DNA polymorphisms is noted and used to calculate the position of the AP2-70-like polypeptide-encoding nucleic acid in the genetic map previously obtained using this population (Botstein et al. (1980) Am. J. Hum. Genet. 32:314-331).

[0371] The production and use of plant gene-derived probes for use in genetic mapping is described in Bernatzky and Tanksley (1986) Plant Mol. Biol. Reporter 4: 37-41. Numerous publications describe genetic mapping of specific cDNA clones using the methodology outlined above or variations thereof. For example, F2 intercross populations, backcross populations, randomly mated populations, near isogenic lines, and other sets of individuals may be used for mapping. Such methodologies are well known to those skilled in the art.

[0372] The nucleic acid probes may also be used for physical mapping (i.e., placement of sequences on physical maps; see Hoheisel et al. In: Non-mammalian Genomic Analysis: A Practical Guide, Academic press 1996, pp. 319-346, and references cited therein).

[0373] In another embodiment, the nucleic acid probes may be used in direct fluorescence in situ hybridisation (FISH) mapping (Trask (1991) Trends Genet. 7:149-154). Although current methods of FISH mapping favour use of large clones (several kb to several hundred kb; see Laan et al. (1995) Genome Res. 5:13-20), improvements in sensitivity may allow performance of FISH mapping using shorter probes.

[0374] The methods according to the present invention result in plants having enhanced yield-related traits, as described hereinbefore. These traits may also be combined with other economically advantageous traits, such as further yield-enhancing traits, tolerance to other abiotic and biotic stresses, traits modifying various architectural features and/or biochemical and/or physiological features.

### DESCRIPTION OF FIGURES

[0375] The present invention will now be described with reference to the following figures in which:

[0376] FIG. 1A-D show a phylogenetic tree taken from Ooka et al., 2003 (DNA Research 10, 239-247). The dashed box 3^{rd} from the bottom, marked “OsNAC7”, is the group comprising the sequence of SEQ ID NO: 2. The cluster of NACs starting from ONAC022 until OsNAC3, represent the cluster comprising the sequences of SEQ ID NO: 51, SEQ ID NO: 53, SEQ ID NO: 55, SEQ ID NO: 57 and SEQ ID NO: 59. Amino acid sequences clustering in these groups (the amino acid sequences given in Tables 3 and 4, for example) are considered to be useful in the methods of the invention.

[0377] FIG. 2 shows the sequence of SEQ ID NO: 132 with (A): Putative nuclear localisation signal, (B): AP2/ERF DNA binding domain, (1): CMVII-1 motif, (3): CMVII-3 motif, (4): CMVII-4 motif, (5): CMVII-5 motif, (6): CMVII-6 motif, (7): CMVII-7 motif, (8): CMVII-8 motif. The CMVII motifs were identified according to Nakano et al. (2006).

[0378] FIG. 3 shows a phylogenetic tree taken from Nakano et al. (Plant Physiol. Vol. 140, 2006) in which the group indicated as I(A-6) includes the group of AP2-70-like polypeptides defined herein.

[0379] FIG. 4 shows a section of a phylogenetic tree comprising AP2-70-like polypeptide sequences defined herein and expanding the group indicated as Group I(A-6) in Nakano et al., 2006. The phylogenetic tree was constructed using a neighbour-joining clustering algorithm as provided in the AlignX programme from the Vector NTI (Invitrogen).

[0380] FIG. 5 shows an alignment of NAC transcription factors as defined hereinabove. The sequences were aligned using AlignX program from Vector NTI suite (InforMax, Bethesda, Md.). Multiple alignment was done with a gap opening penalty of 10 and a gap extension of 0.01. Minor manual editing was also carried out where necessary to better position some conserved regions. The NAC domain and Motifs I to III are indicated. Sequences shown are: OSJNBa0075G19.15″NAM-like (SEQ ID NO: 18); ANAC101″AT5G62380″id=″NP_{—}20104 (SEQ ID NO: 26); 11972.m09332 (SEQ ID NO: 8); OSJNBb0020O11.1protein_id=″XP_{—} (SEQ ID NO: 10); ANAC007/EMB2749″ (SEQ ID NO: 14); ANAC026″AT1G62700″ (SEQ ID NO: 16); 11980.m06650 (SEQ ID NO: 4); OSJNBa0053C23.15″NP_{—}922493.1″N (SEQ ID NO: 34); 11973.m05887 (SEQ ID NO: 6); OJ1015F07.11″ (SEQ ID NO: 24); ANAC037″AT2G18060″NP_{—}179397.1″ (SEQ ID NO: 20); ANAC076″AT4G36160″NP_{—}195339.1″ (SEQ ID NO: 22); medicagoABE89364.1 (SEQ ID NO: 12); Ze567″NAC-domain (SEQ ID NO: 36); ANAC105″At5g66300″AAU94387.1″ (SEQ ID NO: 28); Maizenac6CAH56056.1 (SEQ ID NO: 38); ANAC030″AT1G71930″ (SEQ ID NO: 32); CDS4054 (SEQ ID NO: 2); 11978.m04282 (SEQ ID NO: 22); translationAK071064sense (SEQ ID NO: 30).

[0381] FIG. 6 shows an alignment of NAC transcription factors as defined hereinabove. The sequences were aligned using AlignX program from Vector NTI suite (InforMax, Bethesda, Md.). Multiple alignment was done with a gap opening penalty of 10 and a gap extension of 0.01. Minor manual editing was also carried out where necessary to better position some conserved regions. The NAC domain and Motifs IV to XI are indicated. Sequences shown are: CDS4035 (SEQ ID NO: 51); AY103772.1zeamaystranslation (SEQ ID NO: 63); taNAC2 (SEQ ID NO: 61); TAGRAB1CAA09371.1″ (SEQ ID NO: 65); riceNP_{—}911548.1″ (SEQ ID NO: 67); elaeis (SEQ ID NO: 69); OsNAC4 (SEQ ID NO: 71); GmNAC2″AAY46122.1″ (SEQ ID NO: 73); PetuniaNH10=″nam-like (SEQ ID NO: 85); BnNAC18″NAC-domain (SEQ ID NO: 89); ATAF1 (SEQ ID NO: 95); PrunusPm74″NAC (SEQ ID NO: 87); OsNAC6″protein_id=″BAA89800.1″ (SEQ ID NO: 53); Saccharum (SEQ ID NO: 105); AK068392″putative (SEQ ID NO: 79); OsNAC5″BAA89799.1″ (SEQ ID NO: 55); tomatoNAC (SEQ ID NO: 75); solanum″putative (SEQ ID NO: 81); CaNAC1 (SEQ ID NO: 93); BrassicaNAC5-8″NAC-domain (SEQ ID NO: 77); AT5G08790″=″ATAF2″NP_{—}680161.1″ (SEQ ID NO: 83); ANAC102 (SEQ ID NO: 91); NAC69-3″TaNAC69-3″″NAC (SEQ ID NO: 101); NAC69-1″TaNAC69″″NAC (SEQ ID NO: 103); CDS4034translationNAC3 (SEQ ID NO: 59); medicagoNAClike (SEQ ID NO: 109); LeNAC-NOR″transcription (SEQ ID NO: 97); ONAC10AK063406 (SEQ ID NO: 107); Arabidopsis (SEQ ID NO: 99); ONAC24 (SEQ ID NO: 57).

[0382] FIG. 7 shows a CLUSTAL W multiple sequence alignment of AP2-2 polypeptides from Arabidopsis and rice. SEQ ID NO: 132 (Os06g09390) is indicated in bold and the conserved regions (motifs XII to XVII, SEQ ID NO: 133 to SEQ ID NO: 138) are underlined. Sequences shown are LOC_Os07g47790.1|11977.m08994| (SEQ ID NO: 140); LOC_Os07g47790.2|11977.m29326| (SEQ ID NO: 365); LOC_Os01g21120.1|11971.m08596| (SEQ ID NO: 144); LOC_Os03g08470.1|11973.m06355| (SEQ ID NO: 146); LOC_Os03g08470.2|11973.m34802| (SEQ ID NO: 366); AT2G47520.1 (SEQ ID NO: 150); LOC_Os02g54160.1|11972.m10445| (SEQ ID NO: 152); LOC_Os06g09390.1|11976.m05658| (SEQ ID NO: 367); LOC_Os09g26420.1|11979.m05794| (SEQ ID NO: 154); LOC_Os09g26420.2|11979.m21992| (SEQ ID NO: 368); LOC_Os09g26420.3|11979.m22092| (SEQ ID NO: 369); AT1G53910.1 (SEQ ID NO: 160); AT1G53910.2 (SEQ ID NO: 370); AT3G14230.1 (SEQ ID NO: 164); AT3G14230.2 (SEQ ID NO: 166); AT3G14230.3 (SEQ ID NO: 168); AT3G16770.1 (SEQ ID NO: 170); LOC_Os07g42510.1|11977.m08483| (SEQ ID NO: 172); LOC_Os03g08490.1|11973.m06357| (SEQ ID NO: 174); LOC_Os03g08500.1|11973.m06358| (SEQ ID NO: 176); AT1G72360.1 (SEQ ID NO: 178); LOC_Os03g08460.1|11973.m06354| (SEQ ID NO: 180); LOC_Os05g29810.1|11975.m07218| (SEQ ID NO: 182); LOC_Os03g22170.1|11973.m07620| (SEQ ID NO: 184); LOC_Os10g25170.1|11980.m05467| (SEQ ID NO: 186); LOC_Os09g11460.1|11979.m04408| (SEQ ID NO: 188); LOC_Os09g11460.2|11979.m21977| (SEQ ID NO: 371); LOC_Os09g11480.1|11979.m04410| (SEQ ID NO: 192); LOC_Os12g41030.1|11982.m07885| (SEQ ID NO: 372); LOC_Os12g41060.1|11982.m07888| (SEQ ID NO: 373); AT1G80580.1 (SEQ ID NO: 198).

[0383] FIG. 8 shows an alignment of AP2-70-like polypeptides with Motifs XVIII and XIX indicated and with the AP2 DNA-binding domain also indicated. Sequences shown are LOC_Os02g51670.1|11972.m10198| (SEQ ID NO: 270); LOC_Os06g11860.1|11976.m05903| (SEQ ID NO: 274); LOC_Os08g31580.1|11978.m07152| (SEQ ID NO: 328); LOC_Os09g20350.1|11979.m05242| (SEQ ID NO: 296); LOC_Os03g09170.1|11973.m06423| (SEQ ID NO: 260); AT2G22200.1 (SEQ ID NO: 310); AT4G39780.1 (SEQ ID NO: 286); AT5G65130.1 (SEQ ID NO: 272); AT1G22190.1 (SEQ ID NO: 308); AT1G78080.1 (SEQ ID NO: 284); AT1G36060.1 (SEQ ID NO: 314); LOC_Os10g22600.1|11980.m05267| (SEQ ID NO: 288); LOC_Os05g49700.1|11975.m09040| (SEQ ID NO: 330); AT1G64380.1 (SEQ ID NO: 326).

[0384] FIG. 9 shows a binary vector p163, for increased expression in Oryza sativa of an Oryza sativa NAC transcription factor-encoding nucleic acid under the control of a GOS2 promoter (internal reference PRO0129).

[0385] FIG. 10 shows a binary vector p164, for increased expression in Oryza sativa of an Oryza sativa NAC1 (SEQ ID NO: 50) transcription factor-encoding nucleic acid under the control of a GOS2 promoter (internal reference PRO0129) for constitutive expression.

[0386] FIG. 11 shows a binary vector p165, for increased expression in Oryza sativa of an Oryza sativa NAC4 (SEQ ID NO: 52) transcription factor-encoding nucleic acid under the control of a GOS2 promoter (internal reference PRO0129) for constitutive expression.

[0387] FIG. 12 shows a binary vector p166, for increased expression in Oryza sativa of an Oryza sativa NAC4 (SEQ ID NO: 52) transcription factor-encoding nucleic acid under the control of an RCc3 promoter (internal reference PRO0110) for root-specific expression.

[0388] FIG. 13 shows a binary vector p167, for increased expression in Oryza sativa of an Oryza sativa NAC transcription factor-encoding nucleic acid under the control of a protochlorophylid reductase promoter (internal reference PRO0123).

[0389] FIG. 14 shows a binary vector p167, for increased expression in Oryza sativa of an Oryza sativa NAC6 (SEQ ID NO: 54) transcription factor-encoding nucleic acid under the control of an RCc3 promoter (internal reference PRO0110) for root-specific expression.

[0390] FIG. 15 shows a binary vector p168, for increased expression in Oryza sativa of an Oryza sativa NAC7 (SEQ ID NO: 56) transcription factor-encoding nucleic acid under the control of a GOS2 promoter (internal reference PRO0129) for constitutive expression.

[0391] FIG. 16 shows a binary vector p169, for increased expression in Oryza sativa of an Oryza sativa NAC3 (SEQ ID NO: 58) transcription factor-encoding nucleic acid under the control of an RCc3 promoter (internal reference PRO0110) for root-specific expression.

[0392] FIG. 17 shows a binary vector pGOS2::NAC1, for increased expression in Oryza sativa of an Oryza sativa NAC1 (SEQ ID NO: 50) transcription factor-encoding nucleic acid under the control of a GOS2 promoter for constitutive expression.

[0393] FIG. 18 shows a binary vector pGOS2::NAC4, for increased expression in Oryza sativa of an Oryza sativa NAC4 (SEQ ID NO: 52) transcription factor-encoding nucleic acid under the control of a GOS2 promoter for constitutive expression.

[0394] FIG. 19 shows a binary vector pRCc3::NAC4, for increased expression in Oryza sativa of an Oryza sativa NAC4 (SEQ ID NO: 52) transcription factor-encoding nucleic acid under the control of an RCc3 promoter for root-specific expression.

[0395] FIG. 20 shows a binary vector pRCc3::NAC6, for increased expression in Oryza sativa of an Oryza sativa NAC6 (SEQ ID NO: 54) transcription factor-encoding nucleic acid under the control of an RCc3 promoter for root-specific expression.

[0396] FIG. 21 shows a binary vector pGOS2::NAC7, for increased expression in Oryza sativa of an Oryza sativa NAC7 (SEQ ID NO: 56) transcription factor-encoding nucleic acid under the control of a GOS2 promoter for constitutive expression.

[0397] FIG. 22 shows a binary vector pRCc3::NAC3, for increased expression in Oryza sativa of an Oryza sativa NAC3 (SEQ ID NO: 58) transcription factor-encoding nucleic acid under the control of an RCc3 promoter for root-specific expression.

[0398] FIG. 23 shows the binary vector for increased expression in Oryza sativa of a rice AP2-2 protein-encoding nucleic acid under the control of a GOS2 promoter.

[0399] FIG. 24 shows the binary vector for increased expression in Oryza sativa of an Oryza sativa AP2-70-like protein-encoding nucleic acid under the control of a rice RCC3 promoter (pRCC3).

[0400] FIG. 25 shows the binary vector for increased expression in Oryza sativa of an Oryza sativa AP2-70-like protein-encoding nucleic acid under the control of a rice GOS2 promoter (pGOS2).

[0401] FIGS. 26 to 29 details examples of sequences useful in performing the methods according to the present invention.

[0402] FIG. 30 details the sequences of SEQ ID NO: 341-346.

[0403] FIG. 31 details the sequences of SEQ ID NO: 347-364.

### EXAMPLES

[0404] The present invention will now be described with reference to the following examples, which are by way of illustration alone. The following examples are not intended to completely define or otherwise limit the scope of the invention.

### A) OsNAM2

### Example 1

### Cloning of OsNAM2 cDNA

[0405] Total cellular RNA from 2-week-old rice seedlings was used to clone OsNAM2 cDNA. RNA was extracted using an RNeasy Kit (Qiagen, Germany). OsNAM2 cDNA was 1292 bp long, from 5′ UTR (untranslated region) to the stop codon. Two overlapping cDNAs were joined in the OsNAM2 cDNA clone. A 5′ cDNA of 1025 bp was obtained by 5′ RACE-PCR using an adapter primer (5′-AAGCAGTGGTATCAACGCAGAGTACGCGGG-3′) (SEQ ID NO: 44) and the OsNAM2 specific primer (OsNAM2-2) (5′-CTC TCC AGA GGC GGC ATC ATG TCG GA-3′) (SEQ ID NO: 45). The 5′ RACE-PCR was performed with the BD SMART™ RACE cDNA Amplification Kit (Clontech, USA). The adapter primer (SMART II A Oligonucleotide) was as provided by the manufacturer. The 3′ cDNA of 620 bp was obtained by PCR with two OsNAM2-specific primers (NAM2-1 (5′-TGA TCG GGA TGA GGA AGA C-3′) (SEQ ID NO: 46) and NAM2-3 (5′-GAT CAG TCT CGG TCA TCG ATG-3′) (SEQ ID NO: 47). The first-stranded cDNA as PCR template was synthesized with the Oligotex mRNA kit (Qiagen, Valencia, Calif.). Candidate PCR products were gel-purified, subcloned into the pGEM-T Easy (Promega, USA), and confirmed by sequencing. The vector harboring the 5′ cDNA was cut with HindIII and ligated with a HindIII fragment of the 3′ cDNA vector. The result was a 1292 bp OsNAM2 cDNA.

### Example 2

### Vector Construction

### 2.1 OsNAM2 Under the Control of a GOS2 Promoter

[0406] The entry clone was subsequently used in an LR reaction with a destination vector used for Oryza sativa transformation. This vector contains as functional elements within the T-DNA borders: a plant selectable marker; a screenable marker expression cassette; and a Gateway cassette intended for LR in vivo recombination with the nucleic acid sequence of interest already cloned in the entry clone. A rice GOS2 promoter (SEQ ID NO: 39 or SEQ ID NO: 339) for constitutive expression (internal reference PRO0129) was located upstream of this Gateway cassette.

[0407] After the LR recombination step, the resulting expression vector p163 (FIG. 9) was transformed into Agrobacterium strain LBA4044 and subsequently to Oryza sativa plants.

[0408] Transformed rice plants were allowed to grow and were then examined for the parameters described below.

### 2.2 OsNAM2 Under the Control of a Protochlorophylid Reductase Promoter

[0409] The entry clone was subsequently used in an LR reaction with a destination vector used for Oryza sativa transformation. This vector contains as functional elements within the T-DNA borders: a plant selectable marker; a screenable marker expression cassette; and a Gateway cassette intended for LR in vivo recombination with the nucleic acid sequence of interest already cloned in the entry clone. A protochlorophylid reductase promoter (SEQ ID NO: 40) for green tissue-specific expression (internal reference PRO0123) was located upstream of this Gateway cassette.

[0410] After the LR recombination step, the resulting expression vector p167 (FIG. 13) was transformed into Agrobacterium strain LBA4044 and subsequently to Oryza sativa plants. Transformed rice plants were allowed to grow and were then examined for the parameters described below.

### Example 3

### Evaluation Procedure

### 3.1 Evaluation Setup

[0411] Approximately 30 independent T0 rice transformants were generated. The primary transformants were transferred from a tissue culture chamber to a greenhouse for growing and harvest of T1 seed. Seven events, of which the T1 progeny segregated 3:1 for presence/absence of the transgene, were retained. For each of these events, approximately 10 T1 seedlings containing the transgene (hetero- and homo-zygotes) and approximately 10 T1 seedlings lacking the transgene (nullizygotes) were selected by monitoring visual marker expression. The transgenic plants and the corresponding nullizygotes were grown side-by-side at random positions. Greenhouse conditions were of shorts days (12 hours light), 28° C. in the light and 22° C. in the dark, and a relative humidity of 70%. From the stage of sowing until the stage of maturity the plants were passed several times through a digital imaging cabinet. At each time point digital images (2048×1536 pixels, 16 million colours) were taken of each plant from at least 6 different angles.

3.2 Statistical Analysis: t-Test and F-Test

[0412] A two factor ANOVA (analysis of variants) was used as a statistical model for the overall evaluation of plant phenotypic characteristics. An F-test was carried out on all the parameters measured of all the plants of all the events transformed with the gene of the present invention. The F-test was carried out to check for an effect of the gene over all the transformation events and to verify an overall effect of the gene, also known as a global gene effect. The threshold for significance for a true global gene effect was set at a 5% probability level for the F-test. A significant F-test value points to a gene effect, meaning that it is not only the mere presence or position of the gene that is causing the differences in phenotype.

[0413] To check for an effect of the genes within an event, i.e., for a line-specific effect, a t-test was performed within each event using data sets from the transgenic plants and the corresponding null plants. “Null plants” or “null segregants” or “nullizygotes” are the plants treated in the same way as the transgenic plant, but from which the transgene has segregated. Null plants can also be described as the homozygous negative transformed plants. The threshold for significance for the t-test is set at 10% probability level. The results for some events can be above or below this threshold. This is based on the hypothesis that a gene might only have an effect in certain positions in the genome, and that the occurrence of this position-dependent effect is not uncommon. This kind of gene effect is also named herein a “line effect of the gene”. The p-value is obtained by comparing the t-value to the t-distribution or alternatively, by comparing the F-value to the F-distribution. The p-value then gives the probability that the null hypothesis (i.e., that there is no effect of the transgene) is correct.

### Example 4

### Evaluation Results

### 4.1 OsNAM2 Under the Control of a GOS2 Promoter

[0414] There was an increase in aboveground area, number of panicles, the number of flowers per panicle and the total number of seeds for transgenic plants expressing an OsNAM2 gene under the control of a GOS2 promoter compared to nullizygotes. There was a significant increase in the number of flowers per panicle and the total number of seeds for transgenic plants compared to nullizygotes. There was a >12% increase (average for 4 events) in the number of flowers per panicle for transgenic plants compared to nullizygotes, with a significant p-value from the F-test of <0.0014. Furthermore, there was a 35% increase in the total number of seeds for transgenic plants compared to nullizygotes, with a significant p-value from the F-test of <0.0045.

### 4.2 OsNAM2 Under the Control of a Protochlorophylid Reductase Promoter

[0415] There was an increase in aboveground area, number of panicles and the total number of seeds for transgenic plants expressing an OsNAM2 gene under the control of a protochlorophylid reductase promoter compared to nullizygotes. There was a >16% increase (average for 2 events) in the aboveground area for transgenic plants compared to nullizygotes, with a significant p-value from the F-test of <0.0014. There was a >16% increase in the number of panicles for transgenic plants compared to nullizygotes and a >18% increase in the total number of seeds for transgenic plants compared to nullizygotes.

### B) OsNAC1, 3, 4, 6, and 7

### Example 5

### Cloning of OsNAC1, 3, 4, 6, and 7

[0416] Oryza sativa genes containing a NAC domain, OsNAC1 (Gene bank accession number AK067690), OsNAC3 (AK069257), OsNAC4 (AK068392), OsNAC6 (AK102475) and OsNAC7 (AK107330), were identified to be stress-inducible in rice by expression profiling conducted with the 60K Rice Whole Genome Microarray (GreenGene Biotech Inc., Korea). This microarray contained 70-mer oligonucleotide probes with sequences corresponding to 58,417 known or predicted ORFs covering the entire rice genome (Oh et al., 2005 Plant Physiology 138: 341-351). The full-length cDNAs of OsNAC1 and OsNAC3 were obtained from rice EST stocks generated by GreenGene Biotech Inc. These cDNAs were inserted into EcoR1 and Xho1 sites of Bluescript SKII (Stratagene). The full-length cDNAs of OsNAC4, OsNAC6 and OsNAC7 were amplified by PCR using as template an Oryza sativa seedling cDNA library (GreenGene Biotech, Korea). After reverse transcription of RNA extracted from 14-day-old seedlings that were treated with 400 mM NaCl for 6 hours, the cDNAs were cloned into Uni-ZAP XR (Stratagene). Average insert size of the library was 1.5 kb and original number of plaques was of the order of 1·10⁶ pfu. Original titre was determined to be 2·10⁹ pfu/ml after first amplification of 2·10⁶ pfu/ml. 0.1 μg of cDNA library was used in each 50p1 PCR mixture. PCR primers that were used for the amplification of the OsNAC genes are listed in Table 7. PCR amplifications were performed using Pfu DNA polymerase in standard conditions. The DNA fragments were amplified and purified also using standard methods. PCR products were ligated into EcoR1site of pBluescript SKII and sequenced.

TABLE 7
List of primers used for isolation of OsNACs.

| Gene | Forward Primers | Reverse Primers |
|---|---|---|
| OsNAC4 | 5′CCAACACTAGTAGGATAA | 5′ACCACTGGGCTAATTAAT |
| | AG3′ (SEQ ID NO: 119) | TA3′ (SEQ ID NO: 120) |
| OsNAC6 | 5′GGTCGACCCACGCGTCCG | 5′AACTGAAGTACCCGTTCT |
| | CT3′ (SEQ ID NO: 121) | TA3′ (SEQ ID NO: 122) |
| OsNAC7 | 5′ATCCTCCACAAGAGAAAC | 5′AGTACAGTGTAGCACAAT |
| | TA3′ (SEQ ID NO: 123) | AA3′ (SEQ ID NO: 124) |

### Example 6

### Expression Vector Construction

### 6.1 GOS2 Constructs

[0417] The entry clone was subsequently used in an LR reaction with a destination vector used for Oryza sativa transformation. This vector contains as functional elements within the T-DNA borders: a plant selectable marker; a screenable marker expression cassette; and a Gateway cassette intended for LR in vivo recombination with the nucleic acid sequence of interest already cloned in the entry clone. A rice GOS2 promoter (SEQ ID NO: 39) for constitutive expression (internal reference PRO0129) was located upstream of this Gateway cassette.

[0418] After the LR recombination step, the resulting expression vectors p164 (FIG. 10), p165 (FIG. 11) and p168 (FIG. 15) were each transformed into Agrobacterium strain LBA4044 and subsequently to Oryza sativa plants. Transformed rice plants were allowed to grow and were then examined for the parameters described below.

### 6.2 RCc3 Constructs

[0419] The entry clone was subsequently used in an LR reaction with a destination vector used for Oryza sativa transformation. This vector contains as functional elements within the T-DNA borders: a plant selectable marker; a screenable marker expression cassette; and a Gateway cassette intended for LR in vivo recombination with the nucleic acid sequence of interest already cloned in the entry clone. A rice RCc3 promoter (SEQ ID NO: 110) for root-specific expression (internal reference PRO0110) was located upstream of this Gateway cassette.

[0420] After the LR recombination step, the resulting expression vector p166 (FIG. 12), p167 (FIG. 14) and p169 (FIG. 16) were each transformed into Agrobacterium strain LBA4044 and subsequently to Oryza sativa plants. Transformed rice plants were allowed to grow and were then examined for the parameters described below.

### Example 7

### Evaluation Procedure

### 7.1 Evaluation Setup

[0421] Approximately 30 independent T0 rice transformants were generated. The primary transformants were transferred from a tissue culture chamber to a greenhouse for growing and harvest of T1 seed. Seven events, of which the T1 progeny segregated 3:1 for presence/absence of the transgene, were retained. For each of these events, approximately 10 T1 seedlings containing the transgene (hetero- and homo-zygotes) and approximately 10 T1 seedlings lacking the transgene (nullizygotes) were selected by monitoring visual marker expression. The transgenic plants and the corresponding nullizygotes were grown side-by-side at random positions. Greenhouse conditions were of shorts days (12 hours light), 28° C. in the light and 22° C. in the dark, and a relative humidity of 70%. From the stage of sowing until the stage of maturity the plants were passed several times through a digital imaging cabinet. At each time point digital images (2048×1536 pixels, 16 million colours) were taken of each plant from at least 6 different angles.

### Drought Screen

[0422] Plants from five events (T2 seeds) were grown in potting soil under normal conditions until they approached the heading stage. They were then transferred to a “dry” section where irrigation was withheld. Humidity probes were inserted in randomly chosen pots to monitor the soil water content (SWC). When SWC went below certain thresholds, the plants were automatically re-watered continuously until a normal level was reached again. The plants were then re-transferred again to normal conditions. The rest of the cultivation (plant maturation, seed harvest) was the same as for plants not grown under abiotic stress conditions. A confirmation round was performed consisting of repeating the screen with T2 seeds not harvested from plants of the first drought screen, but from plants grown under normal conditions.

### Parameters Measured

[0423] The plant aboveground area (or leafy biomass) was determined by counting the total number of pixels on the digital images from aboveground plant parts discriminated from the background. This value was averaged for the pictures taken on the same time point from the different angles and was converted to a physical surface value expressed in square mm by calibration. Experiments show that the aboveground plant area measured this way correlates with the biomass of plant parts above ground. The Areamax is the above ground area at the time point at which the plant had reached its maximal leafy biomass.

[0424] The mature primary panicles were harvested, bagged, barcode-labelled and then dried for three days in the oven at 37° C. The panicles were then threshed and all the seeds collected. The filled husks were separated from the empty ones using an air-blowing device. After separation, both seed lots were then counted using a commercially available counting machine. The empty husks were discarded. The filled husks were weighed on an analytical balance and the cross-sectional area of the seeds was measured using digital imaging. This procedure resulted in the set of the following seed-related parameters:

[0425] The flowers-per-panicle estimates the average number of florets per panicle on a plant, derived from the number of total seeds divided by the number of first panicles. The tallest panicle and all the panicles that overlapped with the tallest panicle when aligned vertically, were considered as first panicles and were counted manually. The number of filled seeds was determined by counting the number of filled husks that remained after the separation step. The total seed yield (total seed weight) was measured by weighing all filled husks harvested from a plant. Total seed number per plant was measured by counting the number of husks harvested from a plant and corresponds to the number of florets per plant. Thousand Kernel Weight (TKW) is extrapolated from the number of filled seeds counted and their total weight. Harvest index is defined as the ratio between the total seed weight and the above-ground area (mm²), multiplied by a factor 10⁶. The parameter EmerVigor is an indication of the seedling vigour. It is calculated from the area (in mm²) covered by leafy biomass in the first imaging. The seed fill rate (fillrate) is an indication of the filling of the seeds. It is expressed as a proportion (in %) of the number of filled seeds over the number of florets (nrtotalseed).

[0426] These parameters were derived in an automated way from the digital images using image analysis software and were analysed statistically. Individual seed parameters (including width, length, area, weight) were measured using a custom-made device consisting of two main components, a weighing and imaging device, coupled to software for image analysis.

7.2 Statistical Analysis: t-Test and F-Test

[0427] A two factor ANOVA (analysis of variants) was used as a statistical model for the overall evaluation of plant phenotypic characteristics. An F-test was carried out on all the parameters measured of all the plants of all the events transformed with the gene of the present invention. The F-test was carried out to check for an effect of the gene over all the transformation events and to verify an overall effect of the gene, also known as a global gene effect. The threshold for significance for a true global gene effect was set at a 5% probability level for the F-test. A significant F-test value points to a gene effect, meaning that it is not only the mere presence or position of the gene that is causing the differences in phenotype.

[0428] To check for an effect of the genes within an event, i.e., for a line-specific effect, a t-test was performed within each event using data sets from the transgenic plants and the corresponding null plants. “Null plants” or “null segregants” or “nullizygotes” are the plants treated in the same way as the transgenic plant, but from which the transgene has segregated. Null plants can also be described as the homozygous negative transformed plants. The threshold for significance for the t-test is set at 10% probability level. The results for some events can be above or below this threshold. This is based on the hypothesis that a gene might only have an effect in certain positions in the genome, and that the occurrence of this position-dependent effect is not uncommon. This kind of gene effect is also named herein a “line effect of the gene”. The p-value was obtained by comparing the t-value to the t-distribution or alternatively, by comparing the F-value to the F-distribution. The p-value then gives the probability that the null hypothesis (i.e., that there is no effect of the transgene) is correct.

### Example 8

### Evaluation Results

### 8.1 NAC1 Under the Control of a GOS2 Promoter

[0429] An increase in the following yield-related parameters was observed for transgenic plants overexpressing NAC1 under the control of a GOS2 promoter. The p-value shown is from the t-test unless otherwise indicated. The percentage difference is for transgenic plants compared to nullizygotes. Although not shown in Table 8, an increase in root biomass was also observed, with the best event giving a 7% increase compared to nullizygotes.

TABLE 8
Results for NAC1 under the control of a GOS2 promoter

| | Positive | Average | |
|---|---|---|---|
| Trait | events | difference | p value |
| Area max | 6 events | 13.70% | <0.077 |
| | | overall + 11% | 0 (F test) |
| Emergence vigour | 5 events | 29.60% | <0.225 |
| | | overall + 16% | <0.0108 (F test) |
| TKW | 5 events | 5.40% | <0.097 |
| | | overall + 3% | 0 (F test) |
| First panicles | 3 events | 20.33% | 0.061 |
| Total number seeds | 2 events | 16 | <0.15 |

### 8.2 NAC4 Under the Control of a GOS2 Promoter

[0430] An increase in the following yield-related parameters was observed for transgenic plants overexpressing NAC4 under the control of a GOS2 promoter. The p-value shown is from the t-test unless otherwise indicated. The percentage difference is for transgenic plants compared to nullizygotes. Although not shown in the Table 9a, an increase in seed weight was also observed, with the best event giving a 30% increase compared to nullizygotes. Table 9a shows the results obtained under non-stress conditions and Table 9b shows the results obtained under conditions of stress.

TABLE 9a
Results for NAC4 under the control of a GOS2 promoter

| | Positive | Average | |
|---|---|---|---|
| Trait | events | difference | p value |
| Area max | 3 events | 18.33% | 0.051 |
| | | overall + 9% | <0.0023 (F test) |
| Emergence vigor | 3 events | 30.67% | <0.38 |
| Root max | 2 events | 10.50% | <0.088 |
| TKW | 4 events | 6.50% | <0.042 |
| | | overall + 4% | 0 (F test) |
| First panicles | 3 events | 15.67% | <0.34 |
| Total number seeds | 3 events | 13.33 | <0.281 |
| | | overall + 5% | 0.091 (F test) |

TABLE 9b
Results for NAC4 under the control
of a GOS2 promoter (drought screen)

| | Positive | Average | |
|---|---|---|---|
| Trait | events | difference | p value |
| Area max | 2 events | 10.5% | 0.0011 |
| | | overall + 8% | 0 (F test) |
| Emergence vigor | 3 events | 42% | <0.0007 |
| TKW | 3 events | 4% | <0.042 |
| | | overall + 4.66% | <0.0251 (F test) |
| First panicles | 3 events | 4.33% | 0.091 |
| | | Overall + 2% | <0.00275 (F test) |
| Root thin | 2 events | 6% | <0.0901 |

### 8.3 NAC4 Under the Control of an RCc3 Promoter

[0431] An increase in the following yield-related parameters was observed for transgenic plants overexpressing NAC4 under the control of an RCc3 promoter. The p-value shown is from the t-test unless otherwise indicated. The percentage difference is for transgenic plants compared to nullizygotes. Although not shown in Table 10a, an increase in thousand kernel weight was also observed, with the best event giving a 4% increase compared to nullizygotes.

TABLE 10a
Results for NAC4 under the control of an RCc3 promoter

| | Positive | Average | |
|---|---|---|---|
| Trait | events | difference | p value |
| Area max | 2 events | 13.00% | <0.0125 |
| | | overall + 4% | <0.0313 (F test) |
| Emergence vigour | 2 events | 13.50% | <0.288 |
| | | overall + 7% | <0.11 (F test) |
| Root max | 1 event | 9.00% | <0.0597 |
| | | overall + 4% | <0.0722 (F test) |
| Total seed yield | 2 events | 16.00% | <0.094 |
| | | overall + 6% | <0.0733 (F test) |
| Total number seeds | 2 events | 14.5 | <0.137 |

TABLE 10b
Results for NAC4 under the control of
an RCc3 promoter (drought screen)

| | Positive | Average | |
|---|---|---|---|
| Trait | events | difference | p value |
| Area max | 2 events | 8% | <0.1077 |
| Total seed yield | 2 events | 49% | <0.018 |
| | | Overall + 20% | 0.002 (F test) |
| Number filled seeds | 2 events | 50.5% | 0.0138 |
| | | Overall + 20% | 0.0017 (F test) |
| Fill rate | 2 events | 46.5% | <0.0418 |
| | | Overall + 16% | 0.011 (F test) |
| Harvest Index | 2 events | 47% | <0.0168 |
| | | Overall + 19% | 0.0037 |
| Height | 2 events | 6.5% | <0.0103 |
| Number total seeds | 2 events | 26% | <0.0579 |
| | | Overall + 4% | 0.1951 (F test |
| Root max | 2 events | 6.5% | <0.1038 |
| Flower per panicle | 2 events | 17.5% | <0.1019 |

### 8.4 NAC6 Under the Control of an RCc3 Promoter

[0432] An increase in the following yield-related parameters was observed for transgenic plants overexpressing NAC6 under the control of an RCc3 promoter. The p-value shown is from the t-test unless otherwise indicated. The percentage difference is for transgenic plants compared to nullizygotes. Although not shown in Table 11, an increase in the number of flowers per panicle was also observed, with the best event giving a 20% increase compared to nullizygotes. Furthermore, and also not shown in the table, an increase in the number of panicles was also observed, with the best event giving a 28% increase compared to nullizygotes.

TABLE 11
Results for NAC6 under the control of an RCc3 promoter

| | Positive | Average | |
|---|---|---|---|
| Trait | events | difference | p value |
| Area max | 2 events | 17.50% | <0.0104 |
| Emergence vigor | 2 events | 21.00% | <0.2385 |
| Root max | 3 events | 13.33% | <0.0093 |
| | | overall + 5.00% | <0.0673 (F test) |
| rootshoot index | 4 events | 64.00% | <0.1279 |
| | | overall + 37% | <0.0005 (F test) |
| Total seed yield | 2 events | 20.00% | <0.2378 |
| Total number seeds | 2 events | 20% | <0.0323 |

### 8.5 NAC7 Under the Control of a GOS2 Promoter

[0433] An increase in the following yield-related parameters was observed for transgenic plants overexpressing NAC7 under the control of a GOS2 promoter. The p-value shown is from the t-test unless otherwise indicated. The percentage difference is for transgenic plants compared to nullizygotes.

TABLE 12
Results for NAC7 under the control of a GOS2 promoter

| | Positive | Average | |
|---|---|---|---|
| Trait | events | difference | p value |
| Area max | 3 events | 18.33% | <0.011 |
| | | overall + 11% | 0 (F test) |
| Emergence vigor | 3 events | 17.33% | <0.422 |
| Root max | 1 event | 11.00% | <0.0249 |
| | | overall + 4% | <0.0370 (F test) |
| Total seed yield | 2 events | 20.50% | <0.08 |
| Flower per panicle | 3 events | 10% | <0.101 |
| First panicles | | 19.00% | <0.0769 |
| Total number seeds | 2 events | 15% | <0.177 |
| | | overall + 5% | <0.0751 (F test) |

### 8.6 NAC3 Under the Control of an RCc3 Promoter

[0434] An increase in the following yield-related parameters was observed for transgenic plants overexpressing NAC3 under the control of an RCc3 promoter. The p-value shown is from the t-test unless otherwise indicated. The percentage difference is for transgenic plants compared to nullizygotes. Although not shown in Table 13, An increase in aboveground area was observed (with the best event giving a 19% increase), an increase in early vigour (with the best event giving a 20% increase), an increase in root biomass (with the best event giving a 15% increase), an increase in thousand kernel weight, an increase in harvest index (with the best event giving an increase of 26%), an increase in the number of panicles (with the best event giving an increase of 33%).

TABLE 13
Results for NAC3 under the control of an RCc3 promoter

| | Positive | Average | |
|---|---|---|---|
| Trait | events | difference | p value |
| Total seed yield | 2 events | 29.00% | <0.00777 |
| | | overall + 6% | <0.00553 (F test) |
| Total number seeds | 1 event | 44% | <0.0001 |
| | | overall + 5% | <0.1084 (F test) |

### C) AP2-2 Polypeptide

### Example 9

### Identification of Sequences Related to SEQ ID NO: 131 and SEQ ID NO: 132

[0435] Sequences (full length cDNA, ESTs or genomic) related to SEQ ID NO: 131 and/or protein sequences related to SEQ ID NO: 132 were identified amongst those maintained in the Entrez Nucleotides database at the National Center for Biotechnology Information (NCBI) using database sequence search tools, such as the Basic Local Alignment Tool (BLAST) (Altschul et al. (1990) J. Mol. Biol. 215:403-410; and Altschul et al. (1997) Nucleic Acids Res. 25:3389-3402). The program was used to find regions of local similarity between sequences by comparing nucleic acid or polypeptide sequences to sequence databases and by calculating the statistical significance of matches. The polypeptide encoded by SEQ ID NO: 131 was used for the TBLASTN algorithm, with default settings and the filter to ignore low complexity sequences set off. The output of the analysis was viewed by pairwise comparison, and ranked according to the probability score (E-value), where the score reflects the probability that a particular alignment occurs by chance (the lower the E-value, the more significant the hit). In addition to E-values, comparisons were also scored by percentage identity. Percentage identity refers to the number of identical nucleotides (or amino acids) between the two compared nucleic acid (or polypeptide) sequences over a particular length. In some instances, the default parameters may be adjusted to modify the stringency of the search.

[0436] Table 14 provides a list of nucleic acid and protein sequences related to the nucleic acid sequence as represented by SEQ ID NO: 131 and the protein sequence represented by SEQ ID NO: 132.

TABLE 14
Nucleic acid sequences encoding AP2-2
polypeptides and AP2-2 polypeptides.

| | | Nucleic acid | Poly-peptide |
|---|---|---|---|
| Name/identifier | Source organism | SEQ ID NO: | SEQ ID NO: |
| AP2-EREBP | Oryza sativa | 131 | 132 |
| Os07g47790 | Oryza sativa | 139 | 140 |
| AAX13280 | Triticum aestivum | 141 | 142 |
| Os01g21120 | Oryza sativa | 143 | 144 |
| Os03g08470 | Oryza sativa | 145 | 146 |
| CAD56466 | Triticum aestivum | 147 | 148 |
| AT2G47520.1 | Arabidopsis thaliana | 149 | 150 |
| Os02g54160 | Oryza sativa | 151 | 152 |
| Os09g26420 | Oryza sativa | 153 | 154 |
| AAP32468 | Triticum aestivum | 155 | 156 |
| AAP32467 | Triticum aestivum | 157 | 158 |
| AT1G53910.1 | Arabidopsis thaliana | 159 | 160 |
| AAM65746 | Arabidopsis thaliana | 161 | 162 |
| AT3G14230.1 | Arabidopsis thaliana | 163 | 164 |
| AT3G14230.2 | Arabidopsis thaliana | 165 | 166 |
| AT3G14230.3 | Arabidopsis thaliana | 167 | 168 |
| AT3G16770 | Arabidopsis thaliana | 169 | 170 |
| Os07g42510 | Oryza sativa | 171 | 172 |
| Os03g08490 | Oryza sativa | 173 | 174 |
| Os03g08500 | Oryza sativa | 175 | 176 |
| AT1G72360 | Arabidopsis thaliana | 177 | 178 |
| Os03g08460 | Oryza sativa | 179 | 180 |
| Os05g29810 | Oryza sativa | 181 | 182 |
| Os03g22170 | Oryza sativa | 183 | 184 |
| Os10g25170 | Oryza sativa | 185 | 186 |
| Os09g11460 | Oryza sativa | 187 | 188 |
| AAK95687 | Lycopersicon esculentum | 189 | 190 |
| Os09g11480 | Oryza sativa | 191 | 192 |
| AAQ91334 | Lycopersicon esculentum | 193 | 194 |
| AAR87866 | Lycopersicon esculentum | 195 | 196 |
| AT1G80580 | Arabidopsis thaliana | 197 | 198 |
| AAP40022 | Nicotiana tabacum | 199 | 200 |
| CAE54591 | Fagus sylvatica | 201 | 202 |
| CAD21849 | Fagus sylvatica | 203 | 204 |
| ABD65407 | Capsicum annuum | 205 | 206 |
| AAP72289 | Capsicum annuum | 207 | 208 |
| AAS20427 | Capsicum annuum | 209 | 210 |
| AAX07458 | Gossypium hirsutum | 211 | 212 |
| AAT77192 | Gossypium barbadense | 213 | 214 |
| AAX20013 | Gossypium hirsutum | 215 | 216 |
| AAX68526 | Gossypium hirsutum | 217 | 218 |
| AAX68525 | Gossypium hirsutum | 219 | 220 |
| AAT77191 | Gossypium barbadense | 221 | 222 |
| AAV51937 | Gossypium hirsutum | 223 | 224 |
| AAV85777 | Gossypium hirsutum | 225 | 226 |
| AAX07460 | Gossypium hirsutum | 227 | 228 |
| AAX84670 | Manihot esculenta | 229 | 230 |
| AAW33881 | Populus alba × | 231 | 232 |
| | Populus tremula | | |
| BAE71206 | Trifolium pratense | 233 | 234 |
| AAQ10777 | Glycine max | 235 | 236 |
| AAL67489 | Narcissus pseudonarcissus | 237 | 238 |
| CAA05084 | Arabidopsis thaliana | 239 | 240 |
| ABE84970 | Medicago truncatula | 241 | 242 |
| ABE80536 | Medicago truncatula | 243 | 244 |
| AAC29516 | Solanum tuberosum | 245 | 246 |
| BAC56862 | Solanum tuberosum | 247 | 248 |
| AAS01337 | Coffea canephora | 249 | 250 |
| AAZ14085 | Hordeum vulgare | 251 | 252 |
| BAD01556 | Cucumis melo | 253 | 254 |
| BAF43419 | Malus × | 255 | 256 |
| | domestica | | |

### Example 10

### Alignment of AP2-2 Polypeptide Sequences

[0437] Alignment of polypeptide sequences was performed using the AlignX programme from the Vector NTI (Invitrogen) which is based on the popular Clustal algorithm of progressive alignment (Thompson et al. (1997) Nucleic Acids Res 25:4876-4882; Chenna et al. (2003). Nucleic Acids Res 31:3497-3500). Default values are for the gap open penalty of 10, for the gap extension penalty of 0, 1 and the selected weight matrix is Blosum 62 (if polypeptides are aligned). Results in FIG. 7 show that AP2-2 polypeptides share regions of high sequence conservation. Motifs XII to XVII are underlined for Os06g09390 (SEQ ID NO: 132).

### Example 11

### Calculation of Global Percentage Identity Between Polypeptide Sequences Useful in Performing the Methods of the Invention

[0438] Global percentages of similarity and identity between full length polypeptide sequences useful in performing the methods of the invention were determined using one of the methods available in the art, the MatGAT (Matrix Global Alignment Tool) software (BMC Bioinformatics. 2003 4:29. MatGAT: an application that generates similarity/identity matrices using protein or DNA sequences. Campanella J J, Bitincka L, Smalley J; software hosted by Ledion Bitincka). MatGAT software generates similarity/identity matrices for DNA or protein sequences without needing pre-alignment of the data. The program performs a series of pair-wise alignments using the Myers and Miller global alignment algorithm (with a gap opening penalty of 12, and a gap extension penalty of 2), calculates similarity and identity using for example Blosum 62 (for polypeptides), and then places the results in a distance matrix. Sequence similarity is shown in the bottom half of the dividing line and sequence identity is shown in the top half of the diagonal dividing line.

[0439] Parameters used in the comparison were:
[0440] Scoring matrix: Blosum62
[0441] First Gap: 12
[0442] Extending gap: 2

[0443] Results of the software analysis are shown in Table 15 for the global similarity and identity over the full length of the polypeptide sequences (excluding the partial polypeptide sequences). Percentage identity is given above the diagonal and percentage similarity is given below the diagonal.

[0444] The percentage identity between the full length polypeptide sequences useful in performing the methods of the invention can be as low as 20% amino acid identity compared to SEQ ID NO: 132. The sequence identity will be higher when specific domains, such as the AP2 domain are compared.

TABLE 15
MatGAT results for global similarity and identity over the full length of the
polypeptide sequences.

| | 1 | 2 | 3 | 4 | 5 | 6 | 7 | 8 | 9 | 10 | 11 | 12 | 13 | 14 | 15 |
|---|---|---|---|---|---|---|---|---|---|---|---|---|---|---|---|
| 1. SEQID 132 | | 27.7 | 63.3 | 29.8 | 38.3 | 62.4 | 24 | 59.5 | 40.8 | 61.1 | 58.2 | 37.2 | 37.2 | 37.1 | 37 |
| 2. SEQID 140 | 37.8 | | 27.2 | 43.9 | 29.7 | 26.6 | 36.4 | 27.5 | 26.5 | 26.2 | 25.7 | 29.1 | 29.1 | 27.4 | 27.7 |
| 3. SEQID 142 | 76.5 | 35.8 | | 29.9 | 33.1 | 90.8 | 24.5 | 55.9 | 39 | 94.6 | 88.5 | 35.9 | 35.9 | 36.7 | 37.3 |
| 4. SEQID 144 | 37.6 | 55.6 | 35.5 | | 31.1 | 30.3 | 41.1 | 27.6 | 25 | 28.7 | 29.2 | 27.7 | 27.9 | 27.2 | 27.5 |
| 5. SEQID 146 | 50.6 | 37.7 | 48.2 | 39.5 | | 32 | 24.9 | 36.1 | 33.2 | 30.7 | 30.2 | 34.3 | 34.3 | 32.1 | 32.4 |
| 6. SEQID 148 | 74.9 | 35.2 | 94.4 | 35.2 | 47 | | 25.2 | 56.5 | 38.6 | 87.4 | 88 | 36.2 | 36.2 | 37.6 | 37.9 |
| 7. SEQID 150 | 31.8 | 48.1 | 32.1 | 52.7 | 34.1 | 32.1 | | 23.6 | 22.2 | 23.9 | 24.7 | 26.3 | 26.3 | 24.8 | 25.3 |
| 8. SEQID 152 | 74.8 | 35.1 | 69.9 | 34.2 | 47.1 | 69 | 31.2 | | 42.7 | 53.5 | 53.6 | 39.9 | 39.9 | 36.1 | 36.3 |
| 9. SEQID 154 | 54 | 33.6 | 51.5 | 32.6 | 45.7 | 51 | 28 | 56.1 | | 37.3 | 36.1 | 36.8 | 36.8 | 35 | 35.3 |
| 10. SEQID 156 | 73.2 | 33.8 | 96.1 | 34.6 | 46.5 | 91.3 | 31.5 | 67.1 | 50 | | 85.1 | 34.8 | 35.1 | 35.9 | 36.3 |
| 11. SEQID 158 | 70.7 | 34.6 | 89.9 | 36.1 | 45.8 | 90 | 34 | 66.6 | 48 | 86.8 | | 32.5 | 32.5 | 34 | 34.4 |
| 12. SEQID 160 | 53.3 | 38.5 | 54.2 | 35.8 | 48 | 52.5 | 33 | 53.7 | 50 | 53.6 | 49.2 | | 99.4 | 62.2 | 62.8 |
| 13. SEQID 162 | 53.3 | 38.5 | 54.2 | 35.8 | 48 | 52.5 | 33 | 53.7 | 50 | 53.6 | 49.2 | 100 | | 62.2 | 62.8 |
| 14. SEQID 164 | 56.7 | 34.3 | 54.4 | 33.5 | 47.2 | 54.6 | 29.6 | 55.4 | 49.7 | 54.1 | 50.1 | 70.7 | 71 | | 98.9 |
| 15. SEQID 166 | 57.1 | 34.7 | 54.7 | 33.9 | 47.7 | 54.9 | 30.4 | 55.7 | 49.7 | 54.7 | 50.7 | 71.7 | 72 | 98.9 | |
| 16. SEQID 168 | 57.2 | 34.8 | 54.8 | 34 | 47.9 | 55.1 | 30.2 | 55.6 | 51 | 54.8 | 50.8 | 71.9 | 72.2 | 98.7 | 99.7 |
| 17. SEQID 170 | 41.2 | 47.2 | 38.9 | 46.4 | 41.3 | 38.4 | 46.8 | 38.6 | 36.9 | 37.5 | 38.3 | 40.8 | 40.8 | 39.6 | 40 |
| 18. SEQID 172 | 51.9 | 34.8 | 52.1 | 38.9 | 52 | 54.4 | 32.2 | 50.4 | 43.9 | 49.9 | 52.9 | 46.6 | 46.6 | 44.3 | 43.7 |
| 19. SEQID 174 | 46.4 | 34.9 | 43.4 | 40.8 | 51.2 | 46.7 | 31.5 | 48.2 | 40.9 | 42.8 | 44 | 43.3 | 43.6 | 42.2 | 42.7 |
| 20. SEQID 176 | 50 | 38.6 | 49.6 | 40.1 | 52.7 | 49 | 32.8 | 48.2 | 44.7 | 47.6 | 45.5 | 48 | 48 | 44.6 | 45.1 |
| 21. SEQID 178 | 41.7 | 46.9 | 44.5 | 47.7 | 47 | 45 | 44.3 | 42.5 | 39.6 | 42.5 | 44.6 | 45 | 45.3 | 39.6 | 40.3 |
| 22. SEQID 180 | 47.5 | 36.5 | 40.8 | 35.9 | 44.9 | 42.1 | 32.8 | 44.1 | 38.1 | 39.4 | 42.8 | 46.6 | 46.6 | 42.7 | 42.4 |
| 23. SEQID 182 | 32.3 | 50 | 32.7 | 50.7 | 36.8 | 33.2 | 47 | 32.1 | 31.1 | 31.5 | 32.2 | 31.8 | 31.8 | 32.5 | 32.8 |
| 24. SEQID 184 | 39 | 55.1 | 37.2 | 53.5 | 43.1 | 39.8 | 44.9 | 37.3 | 36.9 | 36.6 | 39.8 | 36.3 | 36.3 | 34.3 | 34.7 |
| 25. SEQID 186 | 40.6 | 35.7 | 42 | 41.3 | 50.6 | 42.1 | 32 | 44.4 | 42.7 | 42.5 | 40.7 | 39.7 | 39.7 | 40.1 | 39.5 |
| 26. SEQID 188 | 31.8 | 37.9 | 34.1 | 41.4 | 39.2 | 33.8 | 38.4 | 32.1 | 33.1 | 33 | 35.8 | 34.1 | 34.1 | 33 | 33.6 |
| 27. SEQID 190 | 60.2 | 34.1 | 59.1 | 36.8 | 48.1 | 59.4 | 33.6 | 58.9 | 54.3 | 57.5 | 54.6 | 59.7 | 59.7 | 60.7 | 61.3 |
| 28. SEQID 192 | 39.5 | 41.2 | 38 | 42 | 38.6 | 39.8 | 38 | 38.9 | 37.4 | 36.9 | 39.5 | 39.4 | 39.4 | 38 | 39.5 |
| 29. SEQID 194 | 53.9 | 37 | 54.6 | 38.2 | 47.9 | 55.3 | 34.9 | 50.1 | 46.7 | 53.2 | 53.6 | 57.5 | 57.5 | 58.3 | 57.6 |
| 30. SEQID 196 | 44.2 | 48.8 | 44.5 | 51.2 | 41.3 | 43.8 | 49.2 | 40.5 | 37.6 | 41.4 | 41.9 | 39.1 | 39.1 | 41.2 | 40 |
| 31. SEQID 198 | 29.6 | 35.5 | 33.5 | 34 | 33.2 | 32.7 | 32 | 32.3 | 29.5 | 34.1 | 35.2 | 33.8 | 33.8 | 31.1 | 31.5 |
| 32. SEQID 200 | 56.6 | 32.8 | 55.6 | 37 | 49.9 | 55.3 | 33.3 | 56.1 | 52.3 | 54 | 51.4 | 61.5 | 61.5 | 62.8 | 62.8 |
| 33. SEQID 202 | 56.6 | 34.9 | 57.4 | 37.6 | 49.7 | 57.9 | 31 | 60.8 | 56.8 | 55.3 | 53.4 | 63.8 | 64 | 64.1 | 64.3 |
| 34. SEQID 204 | 56.5 | 34.1 | 57.6 | 37.6 | 49.3 | 57.6 | 30.7 | 60.5 | 55.1 | 56.3 | 53.3 | 62.7 | 62.9 | 62.8 | 63.5 |
| 35. SEQID 206 | 60 | 34.1 | 57.9 | 36.5 | 50.4 | 58.9 | 32.5 | 57.6 | 52.5 | 56.5 | 53.3 | 59.5 | 59.5 | 59.6 | 60.3 |
| 36. SEQID 208 | 59.1 | 32.8 | 56.6 | 35.2 | 49.3 | 57.7 | 32 | 56.6 | 51.3 | 55.3 | 52 | 58.5 | 58.5 | 58.6 | 59.2 |
| 37. SEQID 210 | 44.2 | 48.5 | 43.4 | 52.3 | 42.8 | 43.3 | 45.8 | 42.7 | 39.6 | 40.8 | 42.5 | 43.6 | 43.6 | 41.7 | 41.3 |
| 38. SEQID 212 | 55.4 | 34.9 | 51.8 | 34.6 | 50 | 53.3 | 33.1 | 57.4 | 57.6 | 50 | 47.7 | 64.6 | 64.9 | 65.6 | 65.4 |
| 39. SEQID 214 | 50.3 | 37 | 49.6 | 38.6 | 46.1 | 51.3 | 37 | 48.8 | 44.9 | 47.3 | 52.1 | 54.2 | 54.5 | 53.6 | 54.1 |
| 40. SEQID 216 | 53.5 | 30.8 | 50.8 | 34.1 | 49 | 51.8 | 33.1 | 52.8 | 55.6 | 49.2 | 48.2 | 59.8 | 60.1 | 59.8 | 59.6 |
| 41. SEQID 218 | 39 | 43.3 | 40 | 45.6 | 41.6 | 37.2 | 42.1 | 40 | 37.9 | 37.7 | 41 | 39.9 | 39.7 | 39.3 | 38.4 |
| 42. SEQID 220 | 38.7 | 45.3 | 42 | 47.3 | 42.5 | 40.4 | 46.5 | 37.5 | 40.7 | 37.2 | 40.4 | 40.5 | 40.5 | 40.4 | 40 |
| 43. SEQID 222 | 32.6 | 47.7 | 32.7 | 49.3 | 35.3 | 33 | 51.5 | 32.9 | 31.3 | 30.4 | 31.3 | 33.2 | 33.2 | 33.5 | 34.7 |
| 44. SEQID 224 | 39.2 | 45.9 | 40.8 | 45.1 | 40.4 | 39.5 | 45.9 | 38.9 | 39.4 | 39.4 | 37.7 | 41.1 | 41.1 | 38.8 | 38.9 |
| 45. SEQID 228 | 40.6 | 43.5 | 39.4 | 45.4 | 41.9 | 40.1 | 42.4 | 40.8 | 38.9 | 37.5 | 39.8 | 39.1 | 39.1 | 39.8 | 40.5 |
| 46. SEQID 230 | 58 | 34.1 | 53.5 | 38.1 | 48 | 57 | 32 | 59.3 | 59.3 | 51.7 | 53.5 | 64.8 | 64.8 | 64.6 | 64.6 |
| 47. SEQID 232 | 56.6 | 33.9 | 51.3 | 36.1 | 47.4 | 51.6 | 31.8 | 56.1 | 53.8 | 52.1 | 49.2 | 60.3 | 60 | 61.3 | 61.1 |
| 48. SEQID 234 | 56.9 | 35.1 | 52.7 | 35.3 | 48.1 | 53.2 | 31.7 | 53.8 | 54.5 | 50.9 | 50.6 | 57.4 | 57.4 | 61 | 61.3 |
| 49. SEQID 236 | 55.7 | 35.2 | 52.9 | 35.4 | 45.8 | 53.1 | 33.3 | 57 | 56.8 | 49.7 | 50.8 | 55.7 | 56 | 59.4 | 59.1 |
| 50. SEQID 240 | 40.6 | 46.3 | 42.5 | 47.2 | 40.4 | 41.3 | 46.3 | 39.5 | 36.9 | 39.4 | 41.3 | 39.7 | 39.7 | 39.8 | 40.3 |
| 51. SEQID 242 | 42.5 | 40.7 | 44.8 | 43.9 | 40.7 | 44.7 | 43 | 42.2 | 37.6 | 43.1 | 43.4 | 44.1 | 44.1 | 43 | 43.7 |
| 52. SEQID 244 | 33.4 | 40.8 | 29.6 | 38.3 | 32.9 | 32.1 | 41.7 | 32.9 | 27.8 | 28.7 | 31.9 | 35.2 | 35.5 | 32.5 | 32.8 |
| 53. SEQID 246 | 46.1 | 42.6 | 41.4 | 47.3 | 42.8 | 41.3 | 41.6 | 41.6 | 39.4 | 41.7 | 40.4 | 41.6 | 41.1 | 40.6 | 40.8 |
| 54. SEQID 248 | 42.3 | 46.6 | 40.6 | 45.1 | 42.2 | 40.7 | 43.6 | 37.8 | 37.9 | 39.2 | 39.8 | 42.2 | 42.2 | 41.2 | 41.1 |
| 55. SEQID 250 | 43.4 | 40.1 | 44.8 | 43.2 | 48.5 | 45.6 | 37.7 | 45.5 | 42.7 | 43.7 | 44.3 | 43 | 43 | 42.5 | 42.9 |
| 56. SEQID 252 | 46.7 | 38.4 | 47.3 | 39.6 | 60.5 | 47.9 | 34.1 | 47.9 | 42.4 | 45.9 | 48.5 | 44.7 | 45.8 | 42.5 | 42.9 |
| 57. SEQID 254 | 43.4 | 49.5 | 44.2 | 51.6 | 44.9 | 43.8 | 46.2 | 40.5 | 40.2 | 42.5 | 44 | 43 | 43 | 40.1 | 40 |
| 58. SEQID 256 | 36.2 | 44.8 | 38.3 | 45.6 | 40.4 | 39.5 | 45.2 | 36.4 | 36.6 | 36.3 | 38.9 | 38.3 | 38.3 | 38 | 38.7 |
| | 16 | 17 | 18 | 19 | 20 | 21 | 22 | 23 | 24 | 25 | 26 | 27 | 28 | 29 | 30 |
| 1. SEQID 132 | 37.6 | 29.6 | 38.3 | 30.1 | 34 | 26.5 | 29.6 | 26 | 27.2 | 27.9 | 23.7 | 41.4 | 27.7 | 38.4 | 32.2 |
| 2. SEQID 140 | 27.8 | 34.1 | 28.7 | 27.7 | 27.6 | 34.1 | 26.1 | 40.3 | 45.8 | 28.5 | 26.6 | 26.9 | 32.5 | 28.7 | 36.7 |
| 3. SEQID 142 | 37.4 | 28.5 | 35.2 | 30.7 | 32.4 | 29.1 | 26.6 | 25.8 | 28.2 | 27.8 | 23.5 | 40.1 | 25.3 | 36.7 | 32.8 |
| 4. SEQID 144 | 27.5 | 35.9 | 30.6 | 32 | 31.3 | 33 | 29.8 | 41.6 | 39.3 | 31.4 | 28.8 | 29.4 | 30.2 | 31.2 | 43.5 |
| 5. SEQID 146 | 32.5 | 29.3 | 36.3 | 35.7 | 37.5 | 29.5 | 30.2 | 27.5 | 30.3 | 35.9 | 27.6 | 35.4 | 29.7 | 35.4 | 30.3 |
| 6. SEQID 148 | 38 | 28.4 | 36.9 | 31.6 | 32 | 30.3 | 26.9 | 26.9 | 28.7 | 29.3 | 23.5 | 40.9 | 26.5 | 38 | 33.3 |
| 7. SEQID 150 | 25.7 | 33.3 | 25.1 | 24 | 24.6 | 31.7 | 21.8 | 36.7 | 31 | 24.2 | 26.9 | 28 | 28 | 25.4 | 38.1 |
| 8. SEQID 152 | 36.4 | 28.3 | 37.2 | 32 | 31.6 | 30.1 | 27.9 | 25.8 | 28.6 | 32.2 | 23.4 | 42 | 28.7 | 37.5 | 31.1 |
| 9. SEQID-154 | 35.7 | 25.3 | 31.7 | 30.1 | 31 | 26.2 | 23.8 | 24.7 | 28.8 | 28.1 | 23.6 | 37.8 | 26.2 | 33.6 | 27.5 |
| 10. SEQID 156 | 36.4 | 27.3 | 33.2 | 30.2 | 31.4 | 27.7 | 24.6 | 24.7 | 24.5 | 26.2 | 22.4 | 39 | 24.2 | 35.3 | 30.5 |
| 11. SEQID 158 | 34.5 | 28 | 33.7 | 29.3 | 28.3 | 29.1 | 25.3 | 25.8 | 27.8 | 26.6 | 23.6 | 37.1 | 25.9 | 34.9 | 30.1 |
| 12. SEQID 160 | 63 | 28.5 | 32.4 | 28 | 30.2 | 31.3 | 27.3 | 24.9 | 25.7 | 27.2 | 24.9 | 43.4 | 29.1 | 42.9 | 28.9 |
| 13. SEQID 162 | 63 | 28.5 | 32.4 | 28.2 | 30.2 | 31 | 27.3 | 24.9 | 25.7 | 27.2 | 24.7 | 43.7 | 29.1 | 42.9 | 28.9 |
| 14. SEQID 164 | 98.7 | 29.3 | 32.6 | 27.9 | 29.9 | 27.7 | 26.1 | 24.5 | 26.3 | 27.1 | 24.1 | 42.5 | 27.9 | 44 | 29.1 |
| 15. SEQID 166 | 99.7 | 29.6 | 31.9 | 28.2 | 30.2 | 28.3 | 26.4 | 24.8 | 26.6 | 27.9 | 24.9 | 42.9 | 29.6 | 43.9 | 28.3 |
| 16. SEQID 168 | | 29.7 | 31.9 | 28.3 | 30.3 | 28.1 | 26.7 | 24.9 | 26.7 | 28.5 | 23.9 | 43 | 29.4 | 44.8 | 29.5 |
| 17. SEQID 170 | 40.1 | | 30.7 | 29.6 | 29.3 | 31.6 | 24.8 | 36.1 | 35.6 | 28.5 | 26.5 | 28.9 | 30.4 | 31.6 | 34.9 |
| 18. SEQID 172 | 43.6 | 40.6 | | 31.4 | 32.6 | 30.1 | 28.3 | 28.8 | 28.5 | 32.5 | 24.4 | 33.8 | 26.4 | 32.5 | 28.1 |
| 19. SEQID 174 | 42.8 | 42.7 | 46.2 | | 47.1 | 30.5 | 30.9 | 30.5 | 28.9 | 35.3 | 24.5 | 29.3 | 28.8 | 27.4 | 28.7 |
| 20. SEQID 176 | 45.2 | 41.3 | 50.3 | 59.3 | | 28.9 | 30.3 | 27.9 | 29.2 | 34.3 | 24.6 | 29.8 | 28.5 | 29.9 | 29.7 |
| 21. SEQID 178 | 40.1 | 45 | 45.6 | 44.5 | 45.9 | | 27 | 30.2 | 28.6 | 26.1 | 27.9 | 31.4 | 28.4 | 31.2 | 33.7 |
| 22. SEQID 180 | 42.8 | 38 | 42.1 | 47.2 | 47.1 | 41.4 | | 25.8 | 25 | 26.5 | 26.1 | 28 | 27.5 | 30 | 24.7 |
| 23. SEQID 182 | 32.9 | 46.8 | 39.2 | 38 | 37.7 | 42.7 | 35 | | 37.4 | 27.6 | 28.6 | 23.9 | 33.5 | 26.6 | 31.3 |
| 24. SEQID 184 | 34.5 | 48.8 | 38.6 | 40.5 | 38.6 | 43.1 | 37.1 | 44.4 | | 30.6 | 27.2 | 24.6 | 30.6 | 28.3 | 35.4 |
| 25. SEQID 186 | 39.6 | 40.7 | 45 | 51.2 | 50.2 | 39.8 | 38 | 33.9 | 37.9 | | 26.9 | 29.2 | 28.5 | 27.3 | 26.6 |
| 26. SEQID 188 | 33.7 | 44 | 33 | 37.4 | 36.8 | 41.6 | 35.3 | 37.9 | 39.5 | 39.8 | | 23.3 | 41.3 | 25.7 | 25.2 |
| 27. SEQID 190 | 61.5 | 39.2 | 49.7 | 44.9 | 45.2 | 46.2 | 45.4 | 32.5 | 34.7 | 43 | 33.9 | | 27.1 | 52.8 | 32.8 |
| 28. SEQID 192 | 39.6 | 43.2 | 37.1 | 39.9 | 39.8 | 47.7 | 41.4 | 40.8 | 43.6 | 37.6 | 56.4 | 37.4 | | 29.5 | 26.5 |
| 29. SEQID 194 | 59.1 | 42.2 | 45.3 | 47.1 | 46.5 | 45.3 | 45 | 36.4 | 38.8 | 43.1 | 37 | 66.9 | 41.9 | | 31 |
| 30. SEQID 196 | 41.4 | 51.2 | 39.8 | 41.4 | 42.2 | 53.1 | 39.6 | 41.5 | 50.8 | 38.2 | 42.7 | 45.4 | 44.6 | 43.4 | |
| 31. SEQID 198 | 31.6 | 43.8 | 33.9 | 35.2 | 30.4 | 42 | 34 | 36.3 | 40.6 | 33.5 | 39.5 | 34.4 | 41 | 32.1 | 41.5 |
| 32. SEQID 200 | 62 | 40.8 | 47.8 | 41.3 | 44.4 | 44.2 | 45 | 32.6 | 32.6 | 40.3 | 33.9 | 80.4 | 37.5 | 73.9 | 42.4 |
| 33. SEQID 202 | 64.3 | 38.4 | 47.9 | 45.8 | 47.9 | 44.7 | 46.6 | 32.5 | 36.8 | 41.3 | 35.2 | 71.7 | 35.2 | 62.2 | 44.7 |
| 34. SEQID 204 | 63.5 | 38.1 | 48.3 | 45.6 | 47.5 | 43.5 | 45.9 | 31.7 | 36 | 41.1 | 33.6 | 71.7 | 35.7 | 61.3 | 45.1 |
| 35. SEQID 206 | 60.3 | 41.9 | 50.7 | 44 | 46.4 | 45.1 | 44.8 | 33.9 | 36 | 39.7 | 36.3 | 90.7 | 38.4 | 66.7 | 46.1 |
| 36. SEQID 208 | 59.4 | 41.7 | 49.6 | 43.9 | 47.4 | 45.5 | 46.1 | 34.4 | 36.3 | 40.1 | 36.6 | 89.2 | 38.8 | 67.8 | 46.1 |
| 37. SEQID 210 | 42.2 | 55.7 | 43 | 43.6 | 43.2 | 50.8 | 40.5 | 41.3 | 51.1 | 37.9 | 40.5 | 45.7 | 46.2 | 43.4 | 81.4 |
| 38. SEQID 212 | 65.9 | 40.3 | 47.4 | 43.1 | 45.9 | 43.6 | 43.1 | 33.3 | 33.8 | 41.3 | 33.3 | 67.2 | 35.4 | 57.4 | 44.4 |
| 39. SEQID 214 | 54.3 | 40.8 | 44.7 | 43.9 | 44.1 | 47.6 | 41.1 | 34.5 | 37 | 41.9 | 32.9 | 58.9 | 36.7 | 53.5 | 48.6 |
| 40. SEQID 216 | 59.8 | 35.6 | 49.2 | 43.4 | 45.7 | 42.7 | 42.2 | 30.3 | 32.6 | 39.9 | 33.1 | 63.9 | 35.9 | 55.1 | 41.4 |
| 41. SEQID 218 | 38.2 | 62.5 | 39.2 | 39.9 | 41.6 | 50.8 | 44.5 | 44.4 | 40.6 | 37.9 | 41.8 | 40.1 | 42.5 | 44.3 | 50.6 |
| 42. SEQID 220 | 40.6 | 59.4 | 38 | 38.6 | 40.1 | 48.1 | 40.5 | 47.3 | 45.3 | 38.5 | 44.1 | 38.4 | 43 | 43.4 | 50.8 |
| 43. SEQID 222 | 34.5 | 50.8 | 32.5 | 30.8 | 35 | 42.7 | 35.9 | 51 | 40.7 | 34.5 | 44.4 | 32.5 | 41.2 | 38.5 | 41.9 |
| 44. SEQID 224 | 38.8 | 60.4 | 38 | 39.6 | 40.4 | 47.3 | 41.4 | 45.9 | 45.9 | 38.2 | 42 | 38.2 | 43.9 | 42.5 | 50 |
| 45. SEQID 228 | 40.4 | 62.6 | 40.1 | 39.6 | 41.3 | 50.4 | 42.3 | 44.3 | 42 | 39.8 | 43.5 | 41.1 | 42.7 | 45 | 51.1 |
| 46. SEQID 230 | 64.3 | 39.9 | 50.4 | 45.1 | 46.5 | 45.9 | 44.4 | 33.3 | 34.9 | 42 | 36 | 69.3 | 36.2 | 61.2 | 43.6 |
| 47. SEQID 232 | 61.8 | 39.2 | 46.3 | 40.8 | 43.4 | 43.7 | 43.4 | 31.3 | 35.8 | 38.4 | 32.6 | 67.4 | 36.8 | 56.8 | 42.1 |
| 48. SEQID 234 | 61.3 | 39 | 43.9 | 42.3 | 47 | 44.2 | 47.3 | 32.5 | 36.1 | 39 | 33 | 63.4 | 37.7 | 54.3 | 42.3 |
| 49. SEQID 236 | 59.4 | 39.6 | 45.6 | 44.5 | 46.9 | 43.2 | 41.9 | 33.3 | 37 | 39.1 | 33.6 | 63.5 | 35.4 | 53.1 | 41.9 |
| 50. SEQID 240 | 40.4 | 94.4 | 39.8 | 40.2 | 42.9 | 44.7 | 40.5 | 45.9 | 50 | 37.6 | 43.1 | 41.1 | 42 | 43.4 | 51.9 |
| 51. SEQID 242 | 43.6 | 47.2 | 43.6 | 42.1 | 41.3 | 44.9 | 43.3 | 37.4 | 42.3 | 37.9 | 34.1 | 48.4 | 39 | 48.3 | 58 |
| 52. SEQID 244 | 31.8 | 47.6 | 29.5 | 33.3 | 33.1 | 45 | 33.1 | 35.4 | 39.1 | 32.3 | 42.9 | 33.6 | 39.6 | 36.4 | 41.2 |
| 53. SEQID-246 | 41.2 | 46 | 41.8 | 41.7 | 41.9 | 47.7 | 44.5 | 35.2 | 43.6 | 37.6 | 37.6 | 48.4 | 41.6 | 45 | 81.2 |
| 54. SEQID 248 | 40.4 | 62.1 | 43 | 39.6 | 42.2 | 51.1 | 43.6 | 46.2 | 47 | 41.3 | 42.4 | 41.9 | 47 | 47.1 | 53.8 |
| 55. SEQID 250 | 43 | 45.9 | 47.4 | 45.3 | 45 | 42.6 | 44.4 | 37.7 | 43.8 | 44.7 | 35.6 | 50.5 | 40.4 | 48 | 55.3 |
| 56. SEQID 252 | 43.9 | 40.9 | 47.7 | 45.4 | 51.4 | 46 | 43.9 | 36.6 | 40.2 | 45.7 | 35.4 | 46.8 | 39.9 | 46.6 | 41.8 |
| 57. SEQID 154 | 40.4 | 55.7 | 41.8 | 44.2 | 43.2 | 52 | 41.1 | 41 | 46.9 | 38.2 | 38.5 | 45.2 | 42.9 | 42.8 | 63.7 |
| 58. SEQID-156 | 39.3 | 58.3 | 37.4 | 38.6 | 41.3 | 46.2 | 40.8 | 44 | 46 | 40.4 | 40.9 | 36.8 | 42.5 | 42.8 | 50 |
| | 31 | 32 | 33 | 34 | 35 | 36 | 37 | 38 | 39 | 40 | 41 | 42 | 43 | 44 | 45 |
| 1. SEQID 132 | 20.3 | 41.3 | 41.2 | 41 | 40.3 | 39.4 | 31.4 | 42 | 34.5 | 38.4 | 26.8 | 29.5 | 24.2 | 28.2 | 27 |
| 2. SEQID 140 | 24 | 25.8 | 27 | 26.4 | 25.1 | 26.3 | 36.6 | 26.9 | 26.8 | 25.5 | 33.1 | 33.3 | 35.4 | 33.1 | 33.7 |
| 3. SEQID 142 | 21.5 | 40.3 | 41.2 | 40.5 | 38.7 | 37 | 29.9 | 38.4 | 34.3 | 35.7 | 26.3 | 28 | 24 | 27.9 | 26.2 |
| 4. SEQID 144 | 24.1 | 30.1 | 30.4 | 30.2 | 28.9 | 28.5 | 42.8 | 27.8 | 29.4 | 27.3 | 34.2 | 37.5 | 33.9 | 37 | 34.8 |
| 5. SEQID 146 | 21.5 | 36.8 | 34.5 | 33.8 | 36.9 | 36.2 | 29.7 | 35 | 29.4 | 34.9 | 29.3 | 29.1 | 25.1 | 28.3 | 27.8 |
| 6. SEQID 148 | 21.2 | 41.3 | 43.1 | 42 | 40.6 | 38.9 | 31.2 | 39.9 | 35.6 | 37.2 | 27.4 | 27.8 | 24.4 | 27.7 | 27.2 |
| 7. SEQID 150 | 23 | 26.9 | 26.1 | 25.8 | 26.7 | 26.3 | 39.4 | 25.6 | 26.3 | 25.3 | 33.7 | 34.8 | 35.8 | 34.8 | 32.8 |
| 8. SEQID 152 | 21 | 41.1 | 43 | 43 | 41.1 | 40.1 | 29.8 | 43.2 | 35.9 | 39.7 | 27 | 29.1 | 25.2 | 28 | 27.2 |
| 9. SEQID 154 | 20.8 | 37.1 | 40 | 38.7 | 35.9 | 35.5 | 28.3 | 38.8 | 30.8 | 38.1 | 27.2 | 29.4 | 23.5 | 27.9 | 26.7 |
| 10. SEQID156 | 21.3 | 39.5 | 39.9 | 39.5 | 38.5 | 36.8 | 28 | 36.9 | 32.5 | 34.6 | 25.8 | 26.2 | 22.6 | 27.6 | 25.1 |
| 11. SEQID 158 | 23.7 | 38.1 | 40 | 38.8 | 36.8 | 35.1 | 29.6 | 35.4 | 35.7 | 34.2 | 25.7 | 26.8 | 22.7 | 26.5 | 26.5 |
| 12. SEQID 160 | 23.2 | 47.2 | 48.8 | 47.9 | 44.3 | 43.6 | 32.2 | 52.1 | 39.1 | 46.6 | 28.4 | 30.7 | 25.4 | 30.1 | 28.4 |
| 13. SEQID 162 | 23.2 | 46.9 | 48.8 | 47.6 | 44.1 | 43.3 | 32.2 | 52.1 | 39.1 | 46.6 | 28.4 | 30.9 | 25.4 | 30.4 | 28.4 |
| 14. SEQID 164 | 21.8 | 45.8 | 47 | 45.3 | 43.9 | 43.9 | 29.8 | 50.9 | 38.2 | 45.8 | 28.5 | 30.3 | 24.8 | 30 | 29 |
| 15. SEQID166 | 21.5 | 46 | 47.3 | 45.5 | 43.8 | 43.8 | 30.1 | 51.1 | 38.8 | 46 | 28 | 30.1 | 24.3 | 29.8 | 28.3 |
| 16. SEQID 168 | 21.3 | 45.9 | 47.6 | 45.9 | 44.4 | 44.4 | 30.2 | 52.5 | 39.2 | 46.6 | 28.3 | 31 | 24.3 | 29.9 | 28.3 |
| 17. SEQID 170 | 24.5 | 30.8 | 28.1 | 28.3 | 30.8 | 30.2 | 36.9 | 28.5 | 27.3 | 26.1 | 45 | 44.1 | 39.2 | 44.3 | 45.2 |
| 18. SEQID172 | 21.6 | 34.3 | 32.2 | 32.2 | 34 | 33.2 | 28.9 | 34.3 | 28.8 | 36.2 | 27 | 28.4 | 25.6 | 25.4 | 27.5 |
| 19. SEQID 174 | 23.5 | 26.9 | 30.2 | 29.9 | 28.3 | 27.8 | 28.4 | 28 | 24.9 | 27.8 | 25 | 25.9 | 22 | 27.9 | 24.9 |
| 20. SEQID 176 | 19 | 30.4 | 31.2 | 31.3 | 29.7 | 29.8 | 28.5 | 30.1 | 25.9 | 30.3 | 25.2 | 26.7 | 23.1 | 28 | 25.8 |
| 21. SEQID178 | 23.9 | 32.5 | 33.2 | 33.2 | 31.4 | 31.9 | 32.7 | 32 | 31.5 | 31.5 | 33.9 | 31 | 28.6 | 31.4 | 33.1 |
| 22. SEQID 180 | 20.5 | 27.9 | 29.8 | 29.2 | 27.6 | 28.3 | 24.8 | 27.3 | 22.1 | 25.2 | 27.2 | 26.4 | 23 | 26.1 | 25.8 |
| 23. SEQID 182 | 24.2 | 24 | 24.3 | 24.5 | 24.8 | 25.1 | 32 | 24.4 | 24.5 | 23.7 | 35.2 | 37.5 | 33.2 | 37.4 | 35.5 |
| 24. SEQID 184 | 24.9 | 24.5 | 27.1 | 26.5 | 24.9 | 25.6 | 36 | 25.4 | 25.4 | 24.4 | 29.6 | 30.5 | 26.8 | 31 | 29.4 |
| 25. SEQID 186 | 23.1 | 27.6 | 28 | 27.7 | 27.3 | 26.2 | 25.2 | 28.5 | 24.2 | 27.9 | 25.8 | 24.8 | 23.1 | 25.5 | 25.5 |
| 26. SEQID 188 | 23.8 | 24.7 | 23.3 | 22 | 24.9 | 25.3 | 25.1 | 24.3 | 20.9 | 23.6 | 28.2 | 27.8 | 26.9 | 25.6 | 27 |
| 27. SEQID 190 | 21 | 69.5 | 54.9 | 54.5 | 84.3 | 82.1 | 33.6 | 51.3 | 44.6 | 49.5 | 28.7 | 27.6 | 23.9 | 28.2 | 29 |
| 28. SEQID 192 | 26.7 | 26.7 | 25.2 | 25.2 | 26.5 | 27.2 | 27.1 | 26.1 | 23.5 | 27 | 27.4 | 29.1 | 27.9 | 28.4 | 27 |
| 29. SEQID 194 | 21.3 | 68.5 | 48.7 | 48.3 | 54.5 | 55.4 | 31.7 | 44.9 | 35.9 | 44.2 | 30.4 | 31.6 | 28.4 | 31.3 | 30.7 |
| 30. SEQID 196 | 21.9 | 32.3 | 32.5 | 32.7 | 35.2 | 34 | 72.7 | 32.3 | 34.2 | 28.9 | 32.3 | 33.9 | 28.7 | 33 | 32.9 |
| 31. SEQID 198 | | 20.9 | 18.9 | 18.8 | 20.2 | 20.5 | 23 | 22.1 | 21 | 20.9 | 24.3 | 24.4 | 26.5 | 24.9 | 25.3 |
| 32. SEQID 200 | 31.5 | | 59.9 | 59.5 | 69.4 | 67.4 | 32.3 | 55.1 | 45.4 | 52.9 | 28.1 | 28.8 | 23.5 | 28.5 | 27.3 |
| 33. SEQID 202 | 30.7 | 72.9 | | 96.3 | 56.1 | 55.1 | 33.2 | 66.1 | 54 | 58.6 | 30.5 | 28.5 | 24.1 | 28.9 | 30.7 |
| 34. SEQID204 | 30.7 | 71.8 | 97.1 | | 55.8 | 54.7 | 33.5 | 65.1 | 53 | 57.1 | 29.7 | 28.9 | 24.3 | 27.7 | 30.4 |
| 35. SEQID 206 | 32 | 81.1 | 72.2 | 72 | | 97.3 | 34.4 | 53.5 | 45.8 | 49.5 | 28.8 | 28.9 | 25.3 | 27.2 | 28.8 |
| 36. SEQID-208 | 32.8 | 79.1 | 70.6 | 70.4 | 97.9 | | 33.5 | 52.5 | 44.7 | 48 | 28.4 | 28.1 | 24.7 | 27.1 | 28.4 |
| 37. SEQID 210 | 43.6 | 43.2 | 43.7 | 43.2 | 45.9 | 46.6 | | 32.1 | 32 | 30.6 | 35.8 | 36.5 | 32.5 | 32.4 | 36 |
| 38. SEQID 212 | 31.8 | 69 | 79.7 | 78.7 | 68.7 | 67.4 | 42.8 | | 75.1 | 69.5 | 27.9 | 29 | 25.4 | 29.2 | 29.5 |
| 39. SEQID 214 | 33.5 | 56.1 | 66.9 | 66.1 | 58.7 | 58.3 | 46.4 | 77.7 | | 52.9 | 25.4 | 26.9 | 23.4 | 25.9 | 26.7 |
| 40. SEQID 216 | 32.3 | 64.9 | 72.5 | 70.7 | 63.9 | 61.6 | 40.9 | 83.1 | 64.4 | | 27 | 29.5 | 24 | 29.2 | 27.5 |
| 41. SEQID 218 | 43.7 | 42.6 | 41.3 | 40 | 40.5 | 39.3 | 51.1 | 40.3 | 40.1 | 37.6 | | 62.8 | 65.8 | 61.9 | 95.8 |
| 42. SEQID 220 | 41.8 | 40.6 | 37.8 | 38.1 | 41.1 | 39 | 54.5 | 36.9 | 39.2 | 36.4 | 74.3 | | 47.3 | 94.1 | 64.2 |
| 43. SEQID 222 | 38.7 | 35.1 | 33.1 | 33.3 | 33.1 | 33.3 | 44.3 | 34.1 | 33.2 | 32.8 | 69 | 54.3 | | 46.5 | 68.8 |
| 44. SEQID 224 | 40.6 | 40.3 | 39.4 | 38.1 | 36.8 | 37.4 | 49.2 | 37.9 | 38.9 | 36.9 | 72.8 | 96.9 | 54.1 | | 62.4 |
| 45. SEQID 228 | 42.4 | 43.2 | 42.9 | 41.9 | 40.3 | 38.8 | 52.3 | 41.8 | 41.1 | 38.6 | 97.3 | 74.8 | 70.2 | 73.3 | |
| 46. SEQID 230 | 31.5 | 72.1 | 79.5 | 76.9 | 70.1 | 68 | 44.4 | 77.7 | 65.1 | 70.5 | 39.6 | 39.1 | 34.4 | 36.5 | 40.9 |
| 47. SEQID 232 | 30.5 | 68.2 | 74.5 | 72.9 | 68.2 | 66.3 | 42.4 | 74.1 | 62.6 | 65.4 | 38.4 | 40.5 | 31.6 | 38.9 | 40.5 |
| 48. SEQID 234 | 28.8 | 65.6 | 68.3 | 66.5 | 63.4 | 61.3 | 43.9 | 65.9 | 54.5 | 64.4 | 39.7 | 41.6 | 33 | 38.7 | 39.7 |
| 49. SEQID 236 | 28.6 | 63.8 | 69.8 | 67.2 | 65.4 | 63.5 | 44.5 | 70.3 | 57.8 | 64.6 | 40.4 | 40.1 | 34.4 | 39.6 | 41.9 |
| 50. SEQID 240 | 42.6 | 39.5 | 38.4 | 38.7 | 42.4 | 42.3 | 54.5 | 37.2 | 40.4 | 36.4 | 61.3 | 58.2 | 52 | 60.8 | 63.4 |
| 51. SEQID 242 | 36.1 | 47.3 | 45.5 | 45.3 | 46.7 | 46.6 | 59 | 46.9 | 46.7 | 43.4 | 45.6 | 45.9 | 37 | 45.2 | 45.6 |
| 52. SEQID 244 | 40.2 | 32.6 | 31 | 31.2 | 33.9 | 33.9 | 42.8 | 31.5 | 35.1 | 31.1 | 42.9 | 43.8 | 40.8 | 42.4 | 40.8 |
| 53. SEQID 246 | 39.3 | 42.9 | 44.4 | 44.5 | 47.5 | 47.4 | 75.5 | 46.7 | 51.4 | 42.9 | 43.3 | 47 | 37.9 | 46.3 | 45 |
| 54. SEQID248 | 40.2 | 42.9 | 40.2 | 39.5 | 41.3 | 40.7 | 55.3 | 40.3 | 44.2 | 37.4 | 56.1 | 62.1 | 49.2 | 61.4 | 58 |
| 55. SEQID 250 | 34.3 | 46.8 | 45.2 | 46.9 | 46.9 | 46.3 | 55.6 | 46.7 | 47.4 | 43.4 | 43.2 | 43.8 | 34 | 41.9 | 42.6 |
| 56. SEQID 252 | 36 | 43.7 | 45.8 | 43.2 | 45.1 | 45 | 40.9 | 41.5 | 43 | 43.4 | 38.7 | 39 | 29.9 | 39.9 | 36.6 |
| 57. SEQID254 | 39.9 | 42.9 | 45.5 | 45.1 | 46.1 | 45.5 | 64.1 | 44.4 | 47 | 43.2 | 48 | 49.1 | 38.5 | 48 | 48.7 |
| 58. SEQID 256 | 41.8 | 39.3 | 41.3 | 41.3 | 37.3 | 37.4 | 51.9 | 40 | 39.8 | 38.1 | 62.5 | 66 | 50.4 | 67.5 | 61.1 |
| | 46 | 47 | 48 | 49 | 50 | 51 | 52 | 53 | 54 | 55 | 56 | 57 | 58 | | |
| 1. SEQID 132 | 41 | 41.4 | 40.8 | 41.6 | 28.6 | 29.8 | 21.5 | 33.4 | 27.9 | 32.1 | 33.3 | 31.5 | 26.6 | | |
| 2. SEQID 140 | 28.1 | 27.1 | 26.8 | 27 | 36.4 | 31.3 | 26.8 | 31.8 | 36.4 | 31.1 | 28.4 | 37.8 | 33.2 | | |
| 3. SEQID 142 | 38.8 | 38.3 | 38.6 | 36.2 | 30.3 | 30.5 | 20.2 | 27.2 | 29 | 30.2 | 31.3 | 32.4 | 26.8 | | |
| 4. SEQID 144 | 31.3 | 28.4 | 29.2 | 31.1 | 35.1 | 33.7 | 23.5 | 37.8 | 34.6 | 35 | 30.5 | 43.8 | 36.2 | | |
| 5. SEQID146 | 34.8 | 34.4 | 35.8 | 34.5 | 27.8 | 30.4 | 21.5 | 28.1 | 28.1 | 31.9 | 49.7 | 31.5 | 29.6 | | |
| 6. SEQID148 | 43.4 | 39.7 | 39.8 | 37.9 | 29.5 | 32.2 | 21.5 | 29.4 | 28.9 | 30.3 | 31 | 34.5 | 26.7 | | |
| 7. SEQID 150 | 26.2 | 25 | 24.9 | 25.3 | 33.2 | 33.7 | 29.1 | 34.1 | 35.1 | 31 | 25.5 | 37.7 | 35.7 | | |
| 8. SEQID 152 | 45.3 | 42.4 | 40.8 | 39.5 | 28.3 | 30.4 | 22.1 | 28.6 | 28.1 | 30.7 | 35.7 | 31 | 25.4 | | |
| 9. SEQID 154 | 43.1 | 37.4 | 36.8 | 39.7 | 26 | 27.8 | 19.8 | 27.1 | 27.3 | 30.6 | 30.2 | 28.7 | 27.8 | | |
| 10. SEQID 156 | 39.2 | 37.9 | 37.5 | 34.5 | 28.7 | 27.7 | 19.9 | 27.4 | 27 | 29.1 | 28.8 | 30.8 | 26.8 | | |
| 11. SEQID 158 | 40.9 | 37 | 38.6 | 37 | 29.5 | 29.8 | 21.1 | 27 | 27.4 | 29.2 | 31 | 32.9 | 26.5 | | |
| 12. SEQID160 | 49.3 | 46.3 | 44.8 | 44.4 | 28.3 | 30.8 | 24.1 | 29.9 | 29.7 | 29.3 | 31.1 | 32.2 | 27 | | |
| 13. SEQID 162 | 49.3 | 46 | 45.1 | 44.4 | 28.3 | 30.8 | 24.4 | 29.1 | 30 | 29.3 | 31.6 | 32.5 | 27 | | |
| 14. SEQID 164 | 46.6 | 42.3 | 43.2 | 42.6 | 29.7 | 31 | 22.6 | 28.3 | 29.2 | 29.9 | 30.6 | 29.8 | 28.8 | | |
| 15. SEQID 166 | 47.1 | 42.7 | 43.6 | 42.8 | 30.1 | 31.8 | 21.8 | 28.8 | 29.3 | 30.2 | 30.8 | 29.6 | 28.8 | | |
| 16. SEQID 168 | 46.7 | 42.7 | 44 | 43.1 | 30.1 | 31.4 | 21.7 | 28.6 | 28.8 | 30.3 | 31.9 | 30.2 | 28.6 | | |
| 17. SEQID 170 | 30.2 | 29.1 | 29.1 | 28.4 | 90.8 | 32.5 | 29 | 34.3 | 41.2 | 31.4 | 27.5 | 35.4 | 42.8 | | |
| 18. SEQID 172 | 34.9 | 31.7 | 31.5 | 33.5 | 29.8 | 28.7 | 19.5 | 26.9 | 29.7 | 31.5 | 36 | 30.1 | 27.9 | | |
| 19. SEQID 174 | 31.1 | 28 | 28 | 30.8 | 29 | 28.3 | 21.1 | 26.9 | 29.4 | 28.8 | 32.4 | 25.5 | 28.6 | | |
| 20. SEQID 176 | 31.6 | 29.9 | 32.2 | 33 | 28.7 | 26.5 | 22.5 | 28 | 25.5 | 27.1 | 35.9 | 30.8 | 27.7 | | |
| 21. SEQID 178 | 35.5 | 33.3 | 31.4 | 32.2 | 31.2 | 28.9 | 26.6 | 30.1 | 31.4 | 29.3 | 30 | 35 | 30.6 | | |
| 22. SEQID 180 | 28.2 | 26.4 | 29.6 | 29 | 26.7 | 27.1 | 19.6 | 24.1 | 25.7 | 24.1 | 27.4 | 26.8 | 27.5 | | |
| 23. SEQID 182 | 24.1 | 24.5 | 25.7 | 26.8 | 36.2 | 28.9 | 23.6 | 27 | 33 | 28 | 27.7 | 33.3 | 35.2 | | |
| 24. SEQID184 | 27.4 | 25.7 | 25.6 | 26.2 | 34.9 | 31.8 | 23.7 | 32.8 | 33.6 | 30.6 | 29.8 | 34.2 | 33 | | |
| 25. SEQID 186 | 30 | 28.3 | 27 | 29 | 28.2 | 25.4 | 22.6 | 25.6 | 25.8 | 28 | 32.4 | 26.9 | 28.3 | | |
| 26. SEQID 188 | 23.6 | 21.3 | 22.1 | 24.8 | 27.5 | 23.1 | 27.9 | 23 | 29.1 | 23.2 | 25.8 | 23.4 | 28.3 | | |
| 27. SEQID 190 | 52 | 49.7 | 46.2 | 45.1 | 28.6 | 37.1 | 22.2 | 32.2 | 28.9 | 36.1 | 32.2 | 35.1 | 27.2 | | |
| 28. SEQID 192 | 27.5 | 26.1 | 27.8 | 26.9 | 29.1 | 26.4 | 24.7 | 24.6 | 30.4 | 24.9 | 28.7 | 27.4 | 29.2 | | |
| 29. SEQID194 | 46.2 | 45.3 | 41.8 | 40.1 | 31.5 | 32.8 | 26.6 | 31.3 | 33.2 | 30.9 | 32.6 | 31.4 | 30.7 | | |
| 30. SEQID 196 | 34.1 | 31.4 | 31 | 30.9 | 37.3 | 44.6 | 26.2 | 77.7 | 33.2 | 46.2 | 28.8 | 51.1 | 34.9 | | |
| 31. SEQID 198 | 18.9 | 19.2 | 19.9 | 19.9 | 23.7 | 20 | 24.9 | 21.4 | 22.5 | 23.7 | 22.8 | 22.1 | 25.1 | | |
| 32. SEQID 200 | 57.4 | 55.4 | 48.4 | 46.9 | 30.1 | 35.5 | 22.1 | 32.4 | 31.5 | 34.5 | 32 | 34.5 | 29.7 | | |
| 33. SEQID 202 | 67.1 | 59.2 | 53.5 | 54.4 | 28.6 | 33.8 | 20.4 | 31.5 | 30.3 | 33.2 | 31.1 | 35 | 31 | | |
| 34. SEQID 204 | 66 | 58 | 51.1 | 52.5 | 28.8 | 31.1 | 20.3 | 31.2 | 28.6 | 34 | 30.5 | 34.6 | 31 | | |
| 35. SEQID 206 | 51.8 | 49 | 45.6 | 45.3 | 30.2 | 34.7 | 22.3 | 33.5 | 29.5 | 34.5 | 30.7 | 36.8 | 28.3 | | |
| 36. SEQID 208 | 50.3 | 47.8 | 44.2 | 44.2 | 29.6 | 34.8 | 22.4 | 32.7 | 28.9 | 33.4 | 30.6 | 36 | 28.7 | | |
| 37. SEQID 210 | 33.6 | 31.4 | 33.9 | 34 | 38.2 | 44.3 | 26.8 | 67.9 | 37.6 | 46.3 | 29.5 | 48.6 | 33.9 | | |
| 38. SEQID 212 | 63.7 | 57 | 49.9 | 52.2 | 28 | 34 | 22.3 | 31.6 | 28.4 | 33.8 | 31.2 | 34.3 | 29.6 | | |
| 39. SEQID 214 | 50.8 | 48.2 | 40.3 | 43.5 | 26.1 | 32.4 | 20.4 | 30.6 | 28.4 | 31 | 25.6 | 34 | 25.4 | | |
| 40. SEQID 216 | 57.9 | 53.2 | 49.5 | 48.5 | 27.3 | 32.3 | 19.9 | 29.9 | 27.7 | 31.8 | 31.6 | 31 | 27.4 | | |
| 41. SEQID 218 | 28.6 | 26.6 | 28.8 | 30.1 | 44.4 | 31.5 | 26.3 | 29.1 | 44.6 | 29.4 | 25.3 | 32.2 | 50 | | |
| 42. SEQID 220 | 30.4 | 30.2 | 30.1 | 31.2 | 45.8 | 32.3 | 25 | 31.5 | 48 | 30.6 | 27.9 | 32.4 | 52.1 | | |
| 43. SEQID 222 | 26.5 | 24.5 | 24.9 | 25.6 | 37.7 | 26.9 | 28.8 | 25.3 | 37.5 | 25.6 | 21 | 27.1 | 41.8 | | |
| 44. SEQID 224 | 28.1 | 29.1 | 29.3 | 29.6 | 44.5 | 31.1 | 24.7 | 29.9 | 46.9 | 29.5 | 27.5 | 30.5 | 51.3 | | |
| 45. SEQID 228 | 29.4 | 27.6 | 29.3 | 30.7 | 45.3 | 31 | 24.8 | 29.7 | 45 | 30.3 | 24.9 | 31.8 | 49.4 | | |
| 46. SEQID 230 | | 68.5 | 52.9 | 51.9 | 30.8 | 33.3 | 22.1 | 31.9 | 31.4 | 35.1 | 32.9 | 36 | 29.1 | | |
| 47. SEQID 232 | 80.1 | | 46 | 47.6 | 27.8 | 29.5 | 20.5 | 30 | 29.7 | 35.6 | 32.9 | 32.8 | 27.4 | | |
| 48. SEQID 234 | 68.3 | 62.6 | | 69.4 | 27.5 | 34 | 20.3 | 31.7 | 28.4 | 32.5 | 29.7 | 32.9 | 26 | | |
| 49. SEQID 236 | 69.8 | 66.4 | 80.5 | | 28.6 | 31.9 | 21.2 | 30.8 | 29.4 | 33.9 | 30.8 | 33.1 | 27.8 | | |
| 50. SEQID 240 | 39.9 | 37.9 | 37.4 | 41.1 | | 31.3 | 28.6 | 33.9 | 42 | 32.3 | 28.4 | 36.6 | 40.4 | | |
| 51. SEQID 242 | 45.4 | 42.4 | 46 | 43.8 | 45.9 | | 22.3 | 41.3 | 33.2 | 41.7 | 25.4 | 52.8 | 31.3 | | |
| 52. SEQID 244 | 31.8 | 31.1 | 31.9 | 31.3 | 47.2 | 38 | | 23.3 | 27 | 23.3 | 22.2 | 23.2 | 28 | | |
| 53. SEQID 246 | 45.9 | 41.1 | 44.2 | 43 | 49.3 | 60.7 | 38.9 | | 32.8 | 43.1 | 26 | 47.5 | 31.1 | | |
| 54. SEQID 248 | 44.6 | 40 | 39.5 | 40.9 | 60.2 | 47.2 | 39.4 | 48.7 | | 30.5 | 29.3 | 33.2 | 39.9 | | |
| 55. SEQID 250 | 44.9 | 48.7 | 44.9 | 47.1 | 44.4 | 53.8 | 33.7 | 56.5 | 42.9 | | 29.2 | 46.7 | 30.2 | | |
| 56. SEQID 252 | 47.2 | 45.8 | 39.5 | 43.5 | 40.2 | 40.9 | 32.6 | 42.4 | 41.8 | 44.4 | | 26.5 | 26.9 | | |
| 57. SEQID 254 | 45.4 | 41.6 | 43.1 | 44.5 | 57.9 | 63.6 | 39.6 | 61.1 | 49.8 | 56.5 | 38.4 | | 31.9 | | |
| 58. SEQID 256 | 39.6 | 36.6 | 37.1 | 35.9 | 58.3 | 46.9 | 42.1 | 45 | 54.2 | 41.9 | 39.9 | 46.5 | | | |

### Example 12

### Identification of Domains Comprised in Polypeptide Sequences Useful in Performing the Methods of the Invention

[0445] The Integrated Resource of Protein Families, Domains and Sites (InterPro) database is an integrated interface for the commonly used signature databases for text- and sequence-based searches. The InterPro database combines these databases, which use different methodologies and varying degrees of biological information about well-characterized proteins to derive protein signatures. Collaborating databases include SWISS-PROT, PROSITE, TrEMBL, PRINTS, ProDom and Pfam, Smart and TIGRFAMs. Interpro is hosted at the European Bioinformatics Institute in the United Kingdom.

[0446] The results of the InterPro scan of the polypeptide sequence as represented by SEQ ID NO: 132 resented in Table 16.

TABLE 16
InterPro scan results of the polypeptide
sequence as represented by SEQ ID NO: 132

| Database | Accession number | Accession name |
|---|---|---|
| PRODOM | PD001423 | Q9SP16_ORYSA_Q9SP16; |
| PRINTS | PR00367 | ETHRSPELEMNT |
| GENE3D | G3DSA:3.30.730.10 | no description |
| PFAM | PF00847 | AP2 |
| SMART | SM00380 | AP2 |
| PROFILE | PS51032 | AP2_ERF |
| SUPERFAMILY | SSF54171 | DNA binding domain |

### Example 13

### Topology Prediction of the Polypeptide Sequences Useful in Performing the Methods of the Invention (Subcellular Localization, Transmembrane . . . )

[0447] TargetP 1.1 predicts the subcellular location of eukaryotic proteins. The location assignment is based on the predicted presence of any of the N-terminal pre-sequences: chloroplast transit peptide (cTP), mitochondrial targeting peptide (mTP) or secretory pathway signal peptide (SP). Scores on which the final prediction is based are not really probabilities, and they do not necessarily add to one. However, the location with the highest score is the most likely according to TargetP, and the relationship between the scores (the reliability class) may be an indication of how certain the prediction is. The reliability class (RC) ranges from 1 to 5, where 1 indicates the strongest prediction. TargetP is maintained at the server of the Technical University of Denmark.

[0448] For the sequences predicted to contain an N-terminal presequence a potential cleavage site can also be predicted.

[0449] A number of parameters were selected, such as organism group (non-plant or plant), cutoff sets (none, predefined set of cutoffs, or user-specified set of cutoffs), and the calculation of prediction of cleavage sites (yes or no).

[0450] The results of TargetP 1.1 analysis of the polypeptide sequence as represented by SEQ ID NO: 132 are presented Table 17. The “plant” organism group has been selected, no cutoffs defined, and the predicted length of the transit peptide requested. The subcellular localization of the polypeptide sequence as represented by SEQ ID NO: 132 may be the cytoplasm or nucleus, no transit peptide is predicted.

TABLE 17
TargetP 1.1 analysis of the polypeptide
sequence as represented by SEQ ID NO: 132

| | |
|---|---|
| Length (AA) | 130 |
| Chloroplastic transit peptide | 0.098 |
| Mitochondrial transit peptide | 0.339 |
| Secretory pathway signal peptide | 0.035 |
| Other subcellular targeting | 0.797 |
| Predicted Location | / |
| Reliability class | 3 |
| Predicted transit peptide length | / |

[0451] Many other algorithms can be used to perform such analyses, including:
[0452] ChloroP 1.1 hosted on the server of the Technical University of Denmark;
[0453] Protein Prowler Subcellular Localisation Predictor version 1.2 hosted on the server of the Institute for Molecular Bioscience, University of Queensland, Brisbane, Australia;
[0454] PENCE Proteome Analyst PA-GOSUB 2.5 hosted on the server of the University of Alberta, Edmonton, Alberta, Canada;
[0455] TMHMM, hosted on the server of the Technical University of Denmark

### Example 14

### Expression Vector Construction Using the Nucleic Acid Sequence as Represented by SEQ ID NO: 131

[0456] Unless otherwise stated, recombinant DNA techniques are performed according to standard protocols described in (Sambrook (2001) Molecular Cloning: a laboratory manual, 3rd Edition Cold Spring Harbor Laboratory Press, CSH, New York) or in Volumes 1 and 2 of Ausubel et al. (1994), Current Protocols in Molecular Biology, Current Protocols. Standard materials and methods for plant molecular work are described in Plant Molecular Biology Labfax (1993) by R. D. D. Croy, published by BIOS Scientific Publications Ltd (UK) and Blackwell Scientific Publications (UK).

[0457] The Oryza sativa AP2-2 gene was amplified by PCR from a rice cDNA library. The PCR fragment of the expected length was purified and subsequently cloned in a Gateway® vector using standard technology. The entry clone comprising SEQ ID NO: 131 was then used in an LR reaction with a destination vector used for Oryza sativa transformation. This vector contained as functional elements within the T-DNA borders: a plant selectable marker; a screenable marker expression cassette; and a Gateway cassette intended for LR in vivo recombination with the nucleic acid sequence of interest already cloned in the entry clone. A rice GOS2 promoter (SEQ ID NO: 39) for root specific expression was located upstream of this Gateway cassette.

[0458] After the LR recombination step, the resulting expression vector pGOS2::AP2-2 (FIG. 23) was transformed into Agrobacterium strain LBA4044 according to methods well known in the art.

### Example 15

### Plant Transformation

### Rice Transformation

[0459] The Agrobacterium containing the expression vector was used to transform Oryza sativa plants. Mature dry seeds of the rice japonica cultivar Nipponbare were dehusked. Sterilization was carried out by incubating for one minute in 70% ethanol, followed by 30 minutes in 0.2% HgCl₂, followed by a 6 times 15 minutes wash with sterile distilled water. The sterile seeds were then germinated on a medium containing 2,4-D (callus induction medium). After incubation in the dark for four weeks, embryogenic, scutellum-derived calli were excised and propagated on the same medium. After two weeks, the calli were multiplied or propagated by subculture on the same medium for another 2 weeks. Embryogenic callus pieces were sub-cultured on fresh medium 3 days before co-cultivation (to boost cell division activity).

[0460] Agrobacterium strain LBA4404 containing the expression vector was used for co-cultivation. Agrobacterium was inoculated on AB medium with the appropriate antibiotics and cultured for 3 days at 28° C. The bacteria were then collected and suspended in liquid co-cultivation medium to a density (OD₆₀₀) of about 1. The suspension was then transferred to a Petri dish and the calli immersed in the suspension for 15 minutes. The callus tissues were then blotted dry on a filter paper and transferred to solidified, co-cultivation medium and incubated for 3 days in the dark at 25° C. Co-cultivated calli were grown on 2,4-D-containing medium for 4 weeks in the dark at 28° C. in the presence of a selection agent. During this period, rapidly growing resistant callus islands developed. After transfer of this material to a regeneration medium and incubation in the light, the embryogenic potential was released and shoots developed in the next four to five weeks. Shoots were excised from the calli and incubated for 2 to 3 weeks on an auxin-containing medium from which they were transferred to soil. Hardened shoots were grown under high humidity and short days in a greenhouse.

[0461] Approximately 35 independent T0 rice transformants were generated for one construct. The primary transformants were transferred from a tissue culture chamber to a greenhouse. After a quantitative PCR analysis to verify copy number of the T-DNA insert, only single copy transgenic plants that exhibit tolerance to the selection agent were kept for harvest of T1 seed. Seeds were then harvested three to five months after transplanting. The method yielded single locus transformants at a rate of over 50% (Aldemita and Hodges 1996, Chan et al. 1993, Hiei et al. 1994).

### Corn Transformation

[0462] Transformation of maize (Zea mays) is performed with a modification of the method described by Ishida et al. (1996) Nature Biotech 14(6): 745-50. Transformation is genotype-dependent in corn and only specific genotypes are amenable to transformation and regeneration. The inbred line A188 (University of Minnesota) or hybrids with A188 as a parent are good sources of donor material for transformation, but other genotypes can be used successfully as well. Ears are harvested from corn plant approximately 11 days after pollination (DAP) when the length of the immature embryo is about 1 to 1.2 mm. Immature embryos are cocultivated with Agrobacterium tumefaciens containing the expression vector, and transgenic plants are recovered through organogenesis. Excised embryos are grown on callus induction medium, then maize regeneration medium, containing the selection agent (for example imidazolinone but various selection markers can be used). The Petri plates are incubated in the light at 25° C. for 2-3 weeks, or until shoots develop. The green shoots are transferred from each embryo to maize rooting medium and incubated at 25° C. for 2-3 weeks, until roots develop. The rooted shoots are transplanted to soil in the greenhouse. T1 seeds are produced from plants that exhibit tolerance to the selection agent and that contain a single copy of the T-DNA insert.

### Wheat Transformation

[0463] Transformation of wheat is performed with the method described by Ishida et al. (1996) Nature Biotech 14(6): 745-50. The cultivar Bobwhite (available from CIMMYT, Mexico) is commonly used in transformation. Immature embryos are co-cultivated with Agrobacterium tumefaciens containing the expression vector, and transgenic plants are recovered through organogenesis. After incubation with Agrobacterium, the embryos are grown in vitro on callus induction medium, then regeneration medium, containing the selection agent (for example imidazolinone but various selection markers can be used). The Petri plates are incubated in the light at 25° C. for 2-3 weeks, or until shoots develop. The green shoots are transferred from each embryo to rooting medium and incubated at 25° C. for 2-3 weeks, until roots develop. The rooted shoots are transplanted to soil in the greenhouse. T1 seeds are produced from plants that exhibit tolerance to the selection agent and that contain a single copy of the T-DNA insert.

### Soybean Transformation

[0464] Soybean is transformed according to a modification of the method described in the Texas A&M patent U.S. Pat. No. 5,164,310. Several commercial soybean varieties are amenable to transformation by this method. The cultivar Jack (available from the Illinois Seed foundation) is commonly used for transformation. Soybean seeds are sterilised for in vitro sowing. The hypocotyl, the radicle and one cotyledon are excised from seven-day old young seedlings. The epicotyl and the remaining cotyledon are further grown to develop axillary nodes. These axillary nodes are excised and incubated with Agrobacterium tumefaciens containing the expression vector. After the cocultivation treatment, the explants are washed and transferred to selection media. Regenerated shoots are excised and placed on a shoot elongation medium. Shoots no longer than 1 cm are placed on rooting medium until roots develop. The rooted shoots are transplanted to soil in the greenhouse. T1 seeds are produced from plants that exhibit tolerance to the selection agent and that contain a single copy of the T-DNA insert.

### Rapeseed/Canola Transformation

[0465] Cotyledonary petioles and hypocotyls of 5-6 day old young seedling are used as explants for tissue culture and transformed according to Babic et al. (1998, Plant Cell Rep 17: 183-188). The commercial cultivar Westar (Agriculture Canada) is the standard variety used for transformation, but other varieties can also be used. Canola seeds are surface-sterilized for in vitro sowing. The cotyledon petiole explants with the cotyledon attached are excised from the in vitro seedlings, and inoculated with Agrobacterium (containing the expression vector) by dipping the cut end of the petiole explant into the bacterial suspension. The explants are then cultured for 2 days on MSBAP-3 medium containing 3 mg/l BAP, 3% sucrose, 0.7% Phytagar at 23° C., 16 hr light. After two days of co-cultivation with Agrobacterium, the petiole explants are transferred to MSBAP-3 medium containing 3 mg/l BAP, cefotaxime, carbenicillin, or timentin (300 mg/l) for 7 days, and then cultured on MSBAP-3 medium with cefotaxime, carbenicillin, or timentin and selection agent until shoot regeneration. When the shoots are 5-10 mm in length, they are cut and transferred to shoot elongation medium (MSBAP-0.5, containing 0.5 mg/l BAP). Shoots of about 2 cm in length are transferred to the rooting medium (MS0) for root induction. The rooted shoots are transplanted to soil in the greenhouse. T1 seeds are produced from plants that exhibit tolerance to the selection agent and that contain a single copy of the T-DNA insert.

### Alfalfa Transformation

[0466] A regenerating clone of alfalfa (Medicago sativa) is transformed using the method of (McKersie et al., 1999 Plant Physiol 119: 839-847). Regeneration and transformation of alfalfa is genotype dependent and therefore a regenerating plant is required. Methods to obtain regenerating plants have been described. For example, these can be selected from the cultivar Rangelander (Agriculture Canada) or any other commercial alfalfa variety as described by Brown D C W and A Atanassov (1985. Plant Cell Tissue Organ Culture 4: 111-112). Alternatively, the RA3 variety (University of Wisconsin) has been selected for use in tissue culture (Walker et al., 1978 Am J Bot 65:654-659). Petiole explants are cocultivated with an overnight culture of Agrobacterium tumefaciens C58C1 pMP90 (McKersie et al., 1999 Plant Physiol 119: 839-847) or LBA4404 containing the expression vector. The explants are cocultivated for 3 d in the dark on SH induction medium containing 288 mg/L Pro, 53 mg/L thioproline, 4.35 g/L K2SO4, and 100 μm acetosyringinone. The explants are washed in half-strength Murashige-Skoog medium (Murashige and Skoog, 1962) and plated on the same SH induction medium without acetosyringinone but with a suitable selection agent and suitable antibiotic to inhibit Agrobacterium growth. After several weeks, somatic embryos are transferred to BOi2Y development medium containing no growth regulators, no antibiotics, and 50 g/L sucrose. Somatic embryos are subsequently germinated on half-strength Murashige-Skoog medium. Rooted seedlings were transplanted into pots and grown in a greenhouse. T1 seeds are produced from plants that exhibit tolerance to the selection agent and that contain a single copy of the T-DNA insert.

### Example 16

### Phenotypic Evaluation Procedure

### 16.1 Evaluation Setup

[0467] Approximately 35 independent T0 rice transformants were generated. The primary transformants were transferred from a tissue culture chamber to a greenhouse for growing and harvest of T1 seed. Six events, of which the T1 progeny segregated 3:1 for presence/absence of the transgene, were retained. For each of these events, approximately 10 T1 seedlings containing the transgene (hetero- and homo-zygotes) and approximately 10 T1 seedlings lacking the transgene (nullizygotes) were selected by monitoring visual marker expression. The transgenic plants and the corresponding nullizygotes were grown side-by-side at random positions. Greenhouse conditions were of shorts days (12 hours light), 28° C. in the light and 22° C. in the dark, and a relative humidity of 70%.

[0468] Four T1 events were further evaluated in the T2 generation following the same evaluation procedure as for the T1 generation but with more individuals per event. From the stage of sowing until the stage of maturity the plants were passed several times through a digital imaging cabinet. At each time point digital images (2048×1536 pixels, 16 million colours) were taken of each plant from at least 6 different angles.

### 16.2 Statistical Analysis: F-Test

[0469] A two factor ANOVA (analysis of variants) was used as a statistical model for the overall evaluation of plant phenotypic characteristics. An F-test was carried out on all the parameters measured of all the plants of all the events transformed with the gene of the present invention. The F-test was carried out to check for an effect of the gene over all the transformation events and to verify for an overall effect of the gene, also known as a global gene effect. The threshold for significance for a true global gene effect was set at a 5% probability level for the F-test. A significant F-test value points to a gene effect, meaning that it is not only the mere presence or position of the gene that is causing the differences in phenotype.

### 16.3 Parameters Measured

### Biomass-Related Parameter Measurement

[0470] From the stage of sowing until the stage of maturity the plants were passed several times through a digital imaging cabinet. At each time point digital images (2048×1536 pixels, 16 million colours) were taken of each plant from at least 6 different angles.

[0471] The plant aboveground area (or leafy biomass) was determined by counting the total number of pixels on the digital images from aboveground plant parts discriminated from the background. This value was averaged for the pictures taken on the same time point from the different angles and was converted to a physical surface value expressed in square mm by calibration. Experiments show that the aboveground plant area measured this way correlates with the biomass of plant parts above ground. The above ground area is the area measured at the time point at which the plant had reached its maximal leafy biomass. The early vigour is the plant (seedling) aboveground area three weeks post-germination. Increase in root biomass is expressed as an increase in total root biomass (measured as maximum biomass of roots observed during the lifespan of a plant); or as an increase in the root/shoot index (measured as the ratio between root mass and shoot mass in the period of active growth of root and shoot).

### Seed-Related Parameter Measurements

[0472] The mature primary panicles were harvested, counted, bagged, barcode-labelled and then dried for three days in an oven at 37° C. The panicles were then threshed and all the seeds were collected and counted. The filled husks were separated from the empty ones using an air-blowing device. The empty husks were discarded and the remaining fraction was counted again. The filled husks were weighed on an analytical balance. The number of filled seeds was determined by counting the number of filled husks that remained after the separation step. The total seed yield was measured by weighing all filled husks harvested from a plant. Total seed number per plant was measured by counting the number of husks harvested from a plant. Thousand Kernel Weight (TKW) is extrapolated from the number of filled seeds counted and their total weight. The Harvest Index (HI) in the present invention is defined as the ratio between the total seed yield and the above ground area (mm²), multiplied by a factor 10⁶. The total number of flowers per panicle as defined in the present invention is the ratio between the total number of seeds and the number of mature primary panicles. The seed fill rate as defined in the present invention is the proportion (expressed as a %) of the number of filled seeds over the total number of seeds (or florets).

### Example 17

### Results of the Phenotypic Evaluation of the Transgenic Plants

[0473] The results of the evaluation of transgenic rice plants expressing the AP2-2 nucleic acid are as follows.

[0474] There was an increase in yield compared to corresponding nullizygotes (controls), in particular seed yield, expressed as Thousand Kernel Weight and Harvest Index, was statistically significant increased compared to the control plants. For the TKW, an overall increase of 2% in T1 and of 3.4% in T2 was observed compared to control plants. In the case of harvest index, the overall increase compared to control plants was respectively 9.2% (T1) and 36.2% (T2).

### D) APETELA2-70-Like (AP2-70-Like) Polypeptide

### Example 18

### Identification of AP2-70-Like Sequences

[0475] Sequences (full length cDNA, ESTs or genomic) related to SEQ ID NO: 257 and/or protein sequences related to SEQ ID NO: 258 were identified amongst those maintained in the Entrez Nucleotides database at the National Center for Biotechnology Information (NCBI) using database sequence search tools, such as the Basic Local Alignment Tool (BLAST) (Altschul et al. (1990) J. Mol. Biol. 215:403-410; and Altschul et al. (1997) Nucleic Acids Res. 25:3389-3402). The program was used to find regions of local similarity between sequences by comparing nucleic acid or polypeptide sequences to sequence databases and by calculating the statistical significance of matches. The polypeptide encoded by SEQ ID NO: 257 was used for the TBLASTN algorithm, with default settings and the filter to ignore low complexity sequences set off. The output of the analysis was viewed by pairwise comparison, and ranked according to the probability score (E-value), where the score reflects the probability that a particular alignment occurs by chance (the lower the E-value, the more significant the hit). In addition to E-values, comparisons were also scored by percentage identity. Percentage identity refers to the number of identical nucleotides (or amino acids) between the two compared nucleic acid (or polypeptide) sequences over a particular length. In some instances, the default parameters may be adjusted to modify the stringency of the search.

[0476] Table 18 provides a list of nucleic acid and protein sequences related to the nucleic acid sequence as represented by SEQ ID NO: 257 and the protein sequence represented by SEQ ID NO: 258.

TABLE 18
AP2-70-encoding nucleic acid sequences and AP2-70 polypeptides
useful in the methods of the present invention.

| | | Nucleic acid | Poly-peptide | |
|---|---|---|---|---|
| Name | Source organism | SEQ ID NO: | SEQ ID NO: | Status |
| | Oryza sativa | 257 | 258 | Full length |
| | Oryza sativa | 259 | 260 | Full length |
| NP_001049235.1 | Oryza sativa | 261 | 262 | full length |
| ABB90886.1 | Triticum aestivum | 263 | 264 | Full length |
| AAZ08560.1\| | Triticum aestivum | 265 | 266 | Full length |
| AAX13274.1 | Triticum aestivum | 267 | 268 | Full length |
| NM_001054677.1 | Oryza sativa | 269 | 270 | Full length |
| ABK28776.1 | Arabidopsis thaliana | 271 | 272 | Full length |
| BAD37688.1 | Oryza sativa | 273 | 274 | Full length |
| ABB89754.1 | Asparagus officinalis | 275 | 276 | Full length |
| ABJ09421.1 | Aloe vera | 277 | 278 | Full length |
| AAT39542.1 | Gossypium hirsutum | 279 | 280 | Full length |
| AAF17691.1 | Arabidopsis thaliana | 281 | 282 | Full length |
| NP_177931.1 | Arabidopsis thaliana | 283 | 284 | Full length |
| NP_195688.1 | Arabidopsis thaliana | 285 | 286 | Full length |
| AAM08622.1 | Oryza sativa | 287 | 288 | Full length |
| ABB89755.1 | Broussonetia papyrifera | 289 | 290 | Full length |
| AAZ14831.1 | Jatropha curcas | 291 | 292 | Full length |
| AAC49770.1 | Arabidopsis thaliana | 293 | 294 | Full length |
| NP_001063013.1 | Oryza sativa | 295 | 296 | Full length |
| NP_001061779.1 | Oryza sativa | 297 | 298 | Full length |
| AAO13360.1 | Lycopersicon esculentum | 299 | 300 | Full length |
| AAM80486.1 | Zea mays | 301 | 302 | Full length |
| AAP56252.1 | Oryza sativa | 303 | 304 | Full length |
| AAF76898.1 | Atriplex hortensis | 305 | 306 | Full length |
| NP_173638.1 | Arabidopsis thaliana | 307 | 308 | Full length |
| NP_179810.1 | Arabidopsis thaliana | 309 | 310 | Full length |
| AAZ03388.1 | Glycine max | 311 | 312 | Full length |
| NP_564468.1 | Arabidopsis thaliana | 313 | 314 | Full length |
| NP_179685.1 | Arabidopsis thaliana | 315 | 316 | Full length |
| NP_193098.1 | Arabidopsis thaliana | 317 | 318 | Full length |
| BAD25342.1 | Oryza sativa | 319 | 320 | Full length |
| NP_001053379.1 | Oryza sativa | 321 | 322 | Full length |
| CAD41199.2 | Oryza sativa | 323 | 324 | Full length |
| NP_176620.1 | Arabidopsis thaliana | 325 | 326 | Full length |
| 11978.m07152 | Oryza sativa | 327 | 328 | Full length |
| 11975.m09040 | Oryza sativa | 329 | 330 | Full length |

### Example 19

### Alignment of AP2-70-Like Polypeptide Sequences

[0477] Alignment of polypeptide sequences was performed using the AlignX programme from the Vector NTI (Invitrogen) which is based on the popular Clustal algorithm of progressive alignment (Thompson et al. (1997) Nucleic Acids Res 25:4876-4882; Chenna et al. (2003). Nucleic Acids Res 31:3497-3500). Default values are for the gap open penalty of 10, for the gap extension penalty of 0, 1 and the selected weight matrix is Blosum 62 (if polypeptides are aligned).

[0478] A phylogenetic tree of AP2-70-like polypeptides was constructed using a neighbour-joining clustering algorithm as provided in the AlignX programme from the Vector NTI (Invitrogen).

### Example 20

### Cloning and Vector Construction

[0479] Unless otherwise stated, recombinant DNA techniques are performed according to standard protocols described in (Sambrook (2001) Molecular Cloning: a laboratory manual, 3rd Edition Cold Spring Harbor Laboratory Press, CSH, New York) or in Volumes 1 and 2 of Ausubel et al. (1994), Current Protocols in Molecular Biology, Current Protocols. Standard materials and methods for plant molecular work are described in Plant Molecular Biology Labfax (1993) by R. D. D. Croy, published by BIOS Scientific Publications Ltd (UK) and Blackwell Scientific Publications (UK).

[0480] The Oryza sativa AP2-70 gene was amplified by PCR from a rice cDNA library. The PCR fragment of the expected length was purified and subsequently cloned in a Gateway® vector using standard technology. The entry clone comprising SEQ ID NO: 257 was then used in an LR reaction with a destination vector used for Oryza sativa transformation. This vector contained as functional elements within the T-DNA borders: a plant selectable marker; a screenable marker expression cassette; and a Gateway cassette intended for LR in vivo recombination with the nucleic acid sequence of interest already cloned in the entry clone. A rice GOS2 promoter (SEQ ID NO: 39) for constitutive expression was located upstream of this Gateway cassette.

[0481] After the LR recombination step, the resulting expression vector pGOS2::AP2-70 (FIG. 25) was transformed into Agrobacterium strain LBA4044 according to methods well known in the art.

[0482] A second vector identical to above except comprising an RCc3 promoter (SEQ ID NO: 110) for root-specific expression was also made. Again, after the LR recombination step, the resulting expression vector pRCc3::AP2-70 (FIG. 24) was transformed into Agrobacterium strain LBA4044 according to methods well known in the art.

### Example-21

### Plant Transformation

### Rice Transformation

[0483] The Agrobacterium containing the expression vector was used to transform Oryza sativa plants. Mature dry seeds of the rice japonica cultivar Nipponbare were dehusked. Sterilization was carried out by incubating for one minute in 70% ethanol, followed by 30 minutes in 0.2% HgCl₂, followed by a 6 times 15 minutes wash with sterile distilled water. The sterile seeds were then germinated on a medium containing 2,4-D (callus induction medium). After incubation in the dark for four weeks, embryogenic, scutellum-derived calli were excised and propagated on the same medium. After two weeks, the calli were multiplied or propagated by subculture on the same medium for another 2 weeks. Embryogenic callus pieces were sub-cultured on fresh medium 3 days before co-cultivation (to boost cell division activity).

[0484] Agrobacterium strain LBA4404 containing the expression vector was used for co-cultivation. Agrobacterium was inoculated on AB medium with the appropriate antibiotics and cultured for 3 days at 28° C. The bacteria were then collected and suspended in liquid co-cultivation medium to a density (OD₆₀₀) of about 1. The suspension was then transferred to a Petri dish and the calli immersed in the suspension for 15 minutes. The callus tissues were then blotted dry on a filter paper and transferred to solidified, co-cultivation medium and incubated for 3 days in the dark at 25° C. Co-cultivated calli were grown on 2,4-D-containing medium for 4 weeks in the dark at 28° C. in the presence of a selection agent. During this period, rapidly growing resistant callus islands developed. After transfer of this material to a regeneration medium and incubation in the light, the embryogenic potential was released and shoots developed in the next four to five weeks. Shoots were excised from the calli and incubated for 2 to 3 weeks on an auxin-containing medium from which they were transferred to soil. Hardened shoots were grown under high humidity and short days in a greenhouse.

[0485] Approximately 35 independent T0 rice transformants were generated for one construct. The primary transformants were transferred from a tissue culture chamber to a greenhouse. After a quantitative PCR analysis to verify copy number of the T-DNA insert, only single copy transgenic plants that exhibit tolerance to the selection agent were kept for harvest of T1 seed. Seeds were then harvested three to five months after transplanting. The method yielded single locus transformants at a rate of over 50% (Aldemita and Hodges 1996, Chan et al. 1993, Hiei et al. 1994).

### Corn Transformation

[0486] Transformation of maize (Zea mays) is performed with a modification of the method described by Ishida et al. (1996) Nature Biotech 14(6): 745-50. Transformation is genotype-dependent in corn and only specific genotypes are amenable to transformation and regeneration. The inbred line A188 (University of Minnesota) or hybrids with A188 as a parent are good sources of donor material for transformation, but other genotypes can be used successfully as well. Ears are harvested from corn plant approximately 11 days after pollination (DAP) when the length of the immature embryo is about 1 to 1.2 mm. Immature embryos are cocultivated with Agrobacterium tumefaciens containing the expression vector, and transgenic plants are recovered through organogenesis. Excised embryos are grown on callus induction medium, then maize regeneration medium, containing the selection agent (for example imidazolinone but various selection markers can be used). The Petri plates are incubated in the light at 25° C. for 2-3 weeks, or until shoots develop. The green shoots are transferred from each embryo to maize rooting medium and incubated at 25° C. for 2-3 weeks, until roots develop. The rooted shoots are transplanted to soil in the greenhouse. T1 seeds are produced from plants that exhibit tolerance to the selection agent and that contain a single copy of the T-DNA insert.

### Wheat Transformation

[0487] Transformation of wheat is performed with the method described by Ishida et al. (1996) Nature Biotech 14(6): 745-50. The cultivar Bobwhite (available from CIMMYT, Mexico) is commonly used in transformation. Immature embryos are co-cultivated with Agrobacterium tumefaciens containing the expression vector, and transgenic plants are recovered through organogenesis. After incubation with Agrobacterium, the embryos are grown in vitro on callus induction medium, then regeneration medium, containing the selection agent (for example imidazolinone but various selection markers can be used). The Petri plates are incubated in the light at 25° C. for 2-3 weeks, or until shoots develop. The green shoots are transferred from each embryo to rooting medium and incubated at 25° C. for 2-3 weeks, until roots develop. The rooted shoots are transplanted to soil in the greenhouse. T1 seeds are produced from plants that exhibit tolerance to the selection agent and that contain a single copy of the T-DNA insert.

### Soybean Transformation

[0488] Soybean is transformed according to a modification of the method described in the Texas A&M patent U.S. Pat. No. 5,164,310. Several commercial soybean varieties are amenable to transformation by this method. The cultivar Jack (available from the Illinois Seed foundation) is commonly used for transformation. Soybean seeds are sterilised for in vitro sowing. The hypocotyl, the radicle and one cotyledon are excised from seven-day old young seedlings.

[0489] The epicotyl and the remaining cotyledon are further grown to develop axillary nodes. These axillary nodes are excised and incubated with Agrobacterium tumefaciens containing the expression vector. After the cocultivation treatment, the explants are washed and transferred to selection media. Regenerated shoots are excised and placed on a shoot elongation medium. Shoots no longer than 1 cm are placed on rooting medium until roots develop. The rooted shoots are transplanted to soil in the greenhouse. T1 seeds are produced from plants that exhibit tolerance to the selection agent and that contain a single copy of the T-DNA insert.

### Rapeseed/Canola Transformation

[0490] Cotyledonary petioles and hypocotyls of 5-6 day old young seedling are used as explants for tissue culture and transformed according to Babic et al. (1998, Plant Cell Rep 17: 183-188). The commercial cultivar Westar (Agriculture Canada) is the standard variety used for transformation, but other varieties can also be used. Canola seeds are surface-sterilized for in vitro sowing. The cotyledon petiole explants with the cotyledon attached are excised from the in vitro seedlings, and inoculated with Agrobacterium (containing the expression vector) by dipping the cut end of the petiole explant into the bacterial suspension. The explants are then cultured for 2 days on MSBAP-3 medium containing 3 mg/l BAP, 3% sucrose, 0.7% Phytagar at 23° C., 16 hr light. After two days of co-cultivation with Agrobacterium, the petiole explants are transferred to MSBAP-3 medium containing 3 mg/l BAP, cefotaxime, carbenicillin, or timentin (300 mg/l) for 7 days, and then cultured on MSBAP-3 medium with cefotaxime, carbenicillin, or timentin and selection agent until shoot regeneration. When the shoots are 5-10 mm in length, they are cut and transferred to shoot elongation medium (MSBAP-0.5, containing 0.5 mg/l BAP). Shoots of about 2 cm in length are transferred to the rooting medium (MS0) for root induction. The rooted shoots are transplanted to soil in the greenhouse. T1 seeds are produced from plants that exhibit tolerance to the selection agent and that contain a single copy of the T-DNA insert.

### Alfalfa Transformation

[0491] A regenerating clone of alfalfa (Medicago sativa) is transformed using the method of (McKersie et al., 1999 Plant Physiol 119: 839-847). Regeneration and transformation of alfalfa is genotype dependent and therefore a regenerating plant is required. Methods to obtain regenerating plants have been described. For example, these can be selected from the cultivar Rangelander (Agriculture Canada) or any other commercial alfalfa variety as described by Brown D C W and A Atanassov (1985. Plant Cell Tissue Organ Culture 4: 111-112). Alternatively, the RA3 variety (University of Wisconsin) has been selected for use in tissue culture (Walker et al., 1978 Am J Bot 65:654-659). Petiole explants are cocultivated with an overnight culture of Agrobacterium tumefaciens C58C1 pMP90 (McKersie et al., 1999 Plant Physiol 119: 839-847) or LBA4404 containing the expression vector. The explants are cocultivated for 3 d in the dark on SH induction medium containing 288 mg/L Pro, 53 mg/L thioproline, 4.35 g/L K2SO4, and 100 μm acetosyringinone. The explants are washed in half-strength Murashige-Skoog medium (Murashige and Skoog, 1962) and plated on the same SH induction medium without acetosyringinone but with a suitable selection agent and suitable antibiotic to inhibit Agrobacterium growth. After several weeks, somatic embryos are transferred to BOi2Y development medium containing no growth regulators, no antibiotics, and 50 g/L sucrose. Somatic embryos are subsequently germinated on half-strength Murashige-Skoog medium. Rooted seedlings were transplanted into pots and grown in a greenhouse. T1 seeds are produced from plants that exhibit tolerance to the selection agent and that contain a single copy of the T-DNA insert.

### Example 22

### Phenotypic Evaluation Procedure

### 22.1 Evaluation Setup

[0492] Approximately 35 independent T0 rice transformants were generated. The primary transformants were transferred from a tissue culture chamber to a greenhouse for growing and harvest of T1 seed. Six events, of which the T1 progeny segregated 3:1 for presence/absence of the transgene, were retained. For each of these events, approximately 10 T1 seedlings containing the transgene (hetero- and homo-zygotes) and approximately 10 T1 seedlings lacking the transgene (nullizygotes) were selected by monitoring visual marker expression. The transgenic plants and the corresponding nullizygotes were grown side-by-side at random positions. Greenhouse conditions were of shorts days (12 hours light), 28° C. in the light and 22° C. in the dark, and a relative humidity of 70%.

[0493] Four T1 events were further evaluated in the T2 generation following the same evaluation procedure as for the T1 generation but with more individuals per event. From the stage of sowing until the stage of maturity the plants were passed several times through a digital imaging cabinet. At each time point digital images (2048×1536 pixels, 16 million colours) were taken of each plant from at least 6 different angles.

### 22.2 Statistical Analysis: F-Test

[0494] A two factor ANOVA (analysis of variants) was used as a statistical model for the overall evaluation of plant phenotypic characteristics. An F-test was carried out on all the parameters measured of all the plants of all the events transformed with the gene of the present invention. The F-test was carried out to check for an effect of the gene over all the transformation events and to verify for an overall effect of the gene, also known as a global gene effect. The threshold for significance for a true global gene effect was set at a 5% probability level for the F-test. A significant F-test value points to a gene effect, meaning that it is not only the mere presence or position of the gene that is causing the differences in phenotype.

### 22.3 Parameters Measured

### Biomass-Related Parameter Measurement

[0495] From the stage of sowing until the stage of maturity the plants were passed several times through a digital imaging cabinet. At each time point digital images (2048×1536 pixels, 16 million colours) were taken of each plant from at least 6 different angles.

[0496] The plant aboveground area (or leafy biomass) was determined by counting the total number of pixels on the digital images from aboveground plant parts discriminated from the background. This value was averaged for the pictures taken on the same time point from the different angles and was converted to a physical surface value expressed in square mm by calibration. Experiments show that the aboveground plant area measured this way correlates with the biomass of plant parts above ground. The above ground area is the area measured at the time point at which the plant had reached its maximal leafy biomass. The early vigour is the plant (seedling) aboveground area three weeks post-germination. Increase in root biomass is expressed as an increase in total root biomass (measured as maximum biomass of roots observed during the lifespan of a plant); or as an increase in the root/shoot index (measured as the ratio between root mass and shoot mass in the period of active growth of root and shoot).

### Seed-Related Parameter Measurements

[0497] The mature primary panicles were harvested, counted, bagged, barcode-labelled and then dried for three days in an oven at 37° C. The panicles were then threshed and all the seeds were collected and counted. The filled husks were separated from the empty ones using an air-blowing device. The empty husks were discarded and the remaining fraction was counted again. The filled husks were weighed on an analytical balance. The number of filled seeds was determined by counting the number of filled husks that remained after the separation step. The total seed yield was measured by weighing all filled husks harvested from a plant. Total seed number per plant was measured by counting the number of husks harvested from a plant. Thousand Kernel Weight (TKW) is extrapolated from the number of filled seeds counted and their total weight. The Harvest Index (HI) in the present invention is defined as the ratio between the total seed yield and the above ground area (mm²), multiplied by a factor 10⁶. The total number of flowers per panicle as defined in the present invention is the ratio between the total number of seeds and the number of mature primary panicles. The seed fill rate as defined in the present invention is the proportion (expressed as a %) of the number of filled seeds over the total number of seeds (or florets).

### Example 23

### Results of the Phenotypic Evaluation of the Transgenic Plants

[0498] The results of the evaluation of transgenic rice plants expressing an AP2-70 nucleic acid are presented below. The percentage difference between the transgenics and the corresponding nullizygotes is also shown.

TABLE 19a
results of expression of pGOS2::AP2-70

| Trait | Positive events | Average difference |
|---|---|---|
| Root Shoot Index | 3 events | 21.3% |
| | | overall + 14% |
| Total Seed Yield | 2 events | 27% |
| Fill rate | 3 events | 27% |
| TKW | 4 events | 8.75% |
| | | overall + 6% |
| Harvest Index | 4 events | 30.5% |
| | | overall + 16% |
| Root thick | 2 events | 10.5% |
| Height | 2 events | 8% |
| | | overall + 4% |

TABLE 19b
results of expression of pRCc3::AP2-70

| Trait | Positive events | Average difference |
|---|---|---|
| Area max | 2 events | 16.5% |
| | | Overall + 7% |
| Total seed yield | 2 events | 233% |
| | | Overall + 89% |
| Number filled seed | 2 events | 184.5% |
| | | Overall + 68% |
| Fill rate | 2 events | 206% |
| | | Overall + 87% |
| Harvest Index | 2 events | 238.5% |
| | | Overall + 86% |
| TKW | 3 events | 11.3% |
| | | Overall + 7% |
| Height | 2 events | 12.5% |
| | | Overall + 7% |

The application's sequence listing, which the Patent Office published only in electronic form, follows.

SEQUENCE LISTING (373 sequences)

SEQ ID NO: 1 - DNA, 1753 bp, Oryza sativa
atccagatgcgcttgcacttgcacttgcatgcagttcattgctctagctataggctatagctactatacactcatgagaatctgagattgggctgaaaattgatgagcatcgatctgaagaagacatatatatagctgatgatgatatagctttttctgcatatgcttgttttgatctgcagccaatcgatcgaggcatagagagtcaccaggcaatcaaattccaaccatccatcagctagatatatatacagcaaagatcacgatactcctagctagctagctagaagaattgatcggtcgatcggaggaaatagcaatggatcggcatgaggaggaggcaggagagtctccatgtgtgccgccggggttcaggtttcacccgacggaggaggagctggtgggctactacctcgccaggaaggtggcctcccagaagatcgatctcgacatcatccaggagctcgatctctacaggatcgagccatgggatctgcaagagcgttgcaagtacggtgggcatggcggcgatgagcagacggagtggtacttcttcagctacaaggaccgcaagtaccccagcgggacgaggaccaaccgcgccacggcggcgggcttctggaaggccaccggccgcgacaagccggtgctctcgtcgccgtcgacgagggtgatcgggatgaggaagacgctggtgttctacaagggtcgcgcccccaacggccggaagaccgactggatcatccacgagtaccgcctccaatcaaacgaacacgcccctactcaggaggaaggttgggtggtttgccgcgcgtttcagaagccgatgcccaaccagcagcagcacaggctgtcctacggctgcatccccggcagctacggcgccggagcctacgccgccgtccccgacaactacagcttgctgctgcaccacgacaaccctagcttcgccgggcggccattgatgagcgccgctgcctcagctctcttcgccaacaacaacaataacagcgtcgtcgaccacagcaacattctgagttcagagtccaagcttcacttctccgacatgatgccgcctctggagagccccaccatcgtcgacggcgagggctacgtctcgcaggctagcagctgcgtcgacgtcgatcagcaagccggcatcgtcgactggaacctgctcaccagcttgctgccgccgccggcgcatcagctcttccaccacctgccttccgcttctagctccaagaacagcaacaacatttcttcgtcaggcttcatcgatgaccgagactgatcgatcgatccagatcgattattatcaattgacaattcattcatcatatatatgcatgaattcttacaaatacgcacaattaaacgatcgagtgtactattaattagttgattactccgtctccatgatgtatacattaatttgaccactggccatcatcaggccatctgcatgcttactatctagcttatgtcagtacacggttgttagttcattcttaattaattagctactagtgtcagtgtgtgtatctatcggttgttcgtcttttgacctcattgctgagagaggtttgtaactgatgatgattaagttagctagcatttaattaggtgctatatatacacatatatatgcactatcactatatacatcatatatatgtatacatatatcgttgtctgcttaatgtgtacaccacctctctgcagtatatatagtattgatcaattaatttgt

SEQ ID NO: 2 - protein, 324 aa, Oryza sativa
MDRHEEEAGESPCVPPGFRFHPTEEELVGYYLARKVASQKIDLDIIQELDLYRIEPWDLQERCKYGGHGGDEQTEWYFFSYKDRKYPSGTRTNRATAAGFWKATGRDKPVLSSPSTRVIGMRKTLVFYKGRAPNGRKTDWIIHEYRLQSNEHAPTQEEGWVVCRAFQKPMPNQQQHRLSYGCIPGSYGAGAYAAVPDNYSLLLHHDNPSFAGRPLMSAAASALFANNNNNSVVDHSNILSSESKLHFSDMMPPLESPTIVDGEGYVSQASSCVDVDQQAGIVDWNLLTSLLPPPAHQLFHHLPSASSSKNSNNISSSGFIDDRD

SEQ ID NO: 3 - DNA, 1346 bp, Oryza sativa
aatttgcttctcatctttcttctctactcctctcaaatacaagagctcacactgctccctagcttccttcttcatcccttgaactagttgtcagctactgaccagcctgaagatagatgctagtttgtgtagagaattcgatcttctgaggcgtatggtgatcatggagtcatgtgtgcctcctgggtttaggttccaccccaccgacgaggagctcgtcggctactacctccggaagaaggtggcctcgcagaagatcgacctcgacgtcatccgcgacgtcgacctctaccgcatcgagccatgggatctccaagagcattgcaggatagggtacgaggagcagagcgagtggtacttcttcagctacaaggacaggaagtacccgacggggacgaggacgaacagggcgacgatgacggggttctggaaggcgacggggagggacaaggcggtgcgtgagaggagcaggctcatcgggatgaggaagacgctcgtcttctacaagggcagggcacccaacggccacaagaccgactggattgtccacgagtaccgcctcgagtccgacgagaacgccccgcctcaggaagaaggctgggtggtgtgccgcgcgttcaagaagcgaaccatgcagccgccgcggagctccatcggagcatgggaggcgagctactcctaccacgaccccgccgtcttcgtcggcggcggggaacacttcaagcaagaggccgcggccgagctggacggcgtcgccgccgccgccggagctaacgccttcctgcggtactccacccgcctggccgagctcccgcagctggagagcccgccgctgccaagccaggggagccaggcggcctcggccgtcgtcgacggcgaggaagataacgccgattctagcaggcgccctggcggcggcggcggcgccgccgccgcggtgaccacggactggagggcgttcgacaagttcgtcgcgtcccagctcagccccgaggagcagcacacctgccgggccaccgacgacgacgacatggcagcgctgctgctcctcgacggcggcgggcaggaggacgacgccgggaggtggctgggctccgccgggttgctgagcgccgtggcggccgacgcgacgacggactgcggcctcggcaccagctgcgtgcctggcgacatcaactgattcagggccaagccgatcgagctctcacttctccttagcataaagtgtgagatatctacgaattgtatggatggctatatatacgtacgcctatacatatgtagctggtcaaagcatcgtttcagtttcagtttcagttcttggaagtcaatggatgttgaccatt

SEQ ID NO: 4 - protein, 341 aa, Oryza sativa
MVIMESCVPPGFRFHPTDEELVGYYLRKKVASQKIDLDVIRDVDLYRIEPWDLQEHCRIGYEEQSEWYFFSYKDRKYPTGTRTNRATMTGFWKATGRDKAVRERSRLIGMRKTLVFYKGRAPNGHKTDWIVHEYRLESDENAPPQEEGWVVCRAFKKRTMQPPRSSIGAWEASYSYHDPAVFVGGGEHFKQEAAAELDGVAAAAGANAFLRYSTRLAELPQLESPPLPSQGSQAASAVVDGEEDNADSSRRPGGGGGAAAAVTTDWRAFDKFVASQLSPEEQHTCRATDDDDMAALLLLDGGGQEDDAGRWLGSAGLLSAVAADATTDCGLGTSCVPGDIN

SEQ ID NO: 5 - DNA, 1101 bp, Oryza sativa
atggaatcatgcgtccctcctgggttcaggttccaccccaccgacgaggagctcgtcggctactacctccgcaagaaggtcgcctcccagaagatcgacctcgacgtcatccgcgacatcgatctctaccgcatcgaaccctgggatctccaagaacattgtgggatcgggtacgatgagcaaagcgagtggtacttcttcagctacaaggacaggaagtacccgacggggacgaggacgaacagggcgacaatggcggggttctggaaggcgacggggagggacaaggcggtgcacgacaagagcaggctcatcggcatgaggaagacactcgtcttctataagggcagggcgcctaatggccagaagaccgactggatcatgcacgagtaccgcctcgagaccgacgagaacgcgccgccacaggaagaaggatgggtggtgtgccgagcattcaagaagaggacggcgtatccggcgaggagcatggtggagacgtgggactactccttgcacgagcgcaacatcatgagcgccgcggcggcggcggcgttcgccgatccgagcgcggcgtacgcgcagatgaggcggcagcacaggagcgggcggttcaagcaggaggcggagctggacggcgccgccacagccctcctccactactccagccacctcgccgagctgccgcagctcgagagcccctccgcggctgcggcgccgctccagcccaacccgagccagctggccaccgccggcgaggacgacgactgcaagggcgataatggcggtaggagggccaagaaagcccgcgccgccggcgacaaggtggcgacgaccacggactggagagcgctcgacaagttcgtcgcgtcgcagcttagccccggggagtgtggcagcatggaggcaacggcggaagccgcggcggcggcagtcgccggtgtgagctcgccgctggaccacggcgatgacgacatggcagcattgctgtttctcaacagcgacgagagagacgaggtcgacaggtggacggggttgctcggctccggcgccggcgcgagcggcgtcgacggcgacctcggaatctgtgtgtttgacaaatga

SEQ ID NO: 6 - protein, 366 aa, Oryza sativa
MESCVPPGFRFHPTDEELVGYYLRKKVASQKIDLDVIRDIDLYRIEPWDLQEHCGIGYDEQSEWYFFSYKDRKYPTGTRTNRATMAGFWKATGRDKAVHDKSRLIGMRKTLVFYKGRAPNGQKTDWIMHEYRLETDENAPPQEEGWVVCRAFKKRTAYPARSMVETWDYSLHERNIMSAAAAAAFADPSAAYAQMRRQHRSGRFKQEAELDGAATALLHYSSHLAELPQLESPSAAAAPLQPNPSQLATAGEDDDCKGDNGGRRAKKARAAGDKVATTTDWRALDKFVASQLSPGECGSMEATAEAAAAAVAGVSSPLDHGDDDMAALLFLNSDERDEVDRWTGLLGSGAGASGVDGDLGICVFDK

SEQ ID NO: 7 - DNA, 1113 bp, Oryza sativa
atggacactttctcccatgtgccacctggtttccgctttcaccctactgacgaggagctcgtcgattactacctgaggaagaaggtggcatcgaagaaaatcgacctcgacgttataaaagacgtcgacctgtacaaaatcgagccctgggatctccaagagaagtgcaagattggcatggaagaacagaatgactggtacttcttcagccacaaagacaaaaagtacccgacgggcacccgcaccaaccgggccacgggcgccggcttctggaaggcgacggggagggacaagcccatctacgcccgcagctgcctcgtcgggatgaggaagacactcgtcttctacaagggccgtgcccccaatggccagaagtcggactggatcatgcacgagtaccgcctcgagaccaacgaaaacggcaccacacctgaggaaggatgggtggtctgccgggtgttcaagaagcgggtggcgacggtgcggagaatggccgacggatcaccgtgctggttcgatgaccacggcgccgtcggtgcgttcatgccggacctcagctcgccgaggcagctactgccgcaccaccaccaccaccacccgggctcgtcggcggcgctgtaccacggccaccaccaccagcagctgcagcagatgtacggtcactgcaagccggagctggagtaccaccacctcctgccgcaggaggccttcctgcagcatcttcctcagctggagagccccaagccgccgccgccgcctcctgcggcggcggcctacattggcggccacctcggatcgtcgtcgtccaccgcccttactactcacgacgacgaagcctccggctccgccgcgcagcagcagccgccgtcgttggaggctgtttacatggccggcgccggcgtcggcatcggcgtcgacgcgtcggtgacggactggaggctactggacaagttcgtcgcgtctcagctgctcagcaaggagtccatgtccagctacggatcccatccggctcaggtgtttcaggctgcagacggtggcaagcatgaagaggctttggactacgcttcgacgtcggccggctccggcggcggcgaggctgatctgtggaaatag

SEQ ID NO: 8 - protein, 370 aa, Oryza sativa
MDTFSHVPPGFRFHPTDEELVDYYLRKKVASKKIDLDVIKDVDLYKIEPWDLQEKCKIGMEEQNDWYFFSHKDKKYPTGTRTNRATGAGFWKATGRDKPIYARSCLVGMRKTLVFYKGRAPNGQKSDWIMHEYRLETNENGTTPEEGWVVCRVFKKRVATVRRMADGSPCWFDDHGAVGAFMPDLSSPRQLLPHHHHHHPGSSAALYHGHHHQQLQQMYGHCKPELEYHHLLPQEAFLQHLPQLESPKPPPPPPAAAAYIGGHLGSSSSTALTTHDDEASGSAAQQQPPSLEAVYMAGAGVGIGVDASVTDWRLLDKFVASQLLSKESMSSYGSHPAQVFQAADGGKHEEALDYASTSAGSGGGEADLWK

SEQ ID NO: 9 - DNA, 1131 bp, Oryza sativa
atggaagtggaagcaaggatacacctcctgttgatcaagctagtcttctataggagtgcagaagagcgagaatcagcctctgttcatattaacttgctaccagttcgggagctatactttgatccgcggaagaagatggacgcattctcccatgtcccgccaggttttcgtttccaccctactgacgaggaactcgtggattactaccttaggaagaaggtagcactgaagaagatagacttggacgtcataaaagatattgatctgtacaaaattgagccttgggacctacaagaacaatgcaagattggaaacgaggagcagaacgagtggtacttcttcagccacaaggacaagaagtacccgacgggcacacgcaccaacagggcgaccactgccggcttttggaaggccaccgggagggacaagccgatctatgtcaagaactgccttgttgggatgaggaagacgttggttttctacaggggccgggctcccaacggacagaagtcggactggatcatgcacgagtatcgcttggagaccaacgaatacggagctccccaagaggaaggatgggtggtctgcagggtgttcaagaagcgagtcgcggcggtgcaaagggcggccggcgacggcggcgactcacctttctggttcaacgagcacgtcgcgttcatggcgccggcgccaggcctcgactcgccgtaccatggccaccgccagagccacccttgcaagctggaggtagagtatcaccaccacctccttcctcaggaggcggcgccgttcatgcacctcccaaggctggagagccccaagctaccggccgccgacatcattgtcgccaccgcagcgtcgtccgctctccagccgtgcggccacacgacggcgcagcagctgcagctgcagatcgagccggtctacgtgacggccgatgcgtcggcagcagattggagggatcttgacaagctggtggcgtctcagttcggccacggcgactcgactgcgaaggagcccagttactgcaatccggtgcaggtgtttcaggtcgaggggaagcaggaggatagcttggattacgtgtccacgtctgcctcctgcggaggggaggaggatttgtggaaatag

SEQ ID NO: 10 - protein, 376 aa, Oryza sativa
MEVEARIHLLLIKLVFYRSAEERESASVHINLLPVRELYFDPRKKMDAFSHVPPGFRFHPTDEELVDYYLRKKVALKKIDLDVIKDIDLYKIEPWDLQEQCKIGNEEQNEWYFFSHKDKKYPTGTRTNRATTAGFWKATGRDKPIYVKNCLVGMRKTLVFYRGRAPNGQKSDWIMHEYRLETNEYGAPQEEGWVVCRVFKKRVAAVQRAAGDGGDSPFWFNEHVAFMAPAPGLDSPYHGHRQSHPCKLEVEYHHHLLPQEAAPFMHLPRLESPKLPAADIIVATAASSALQPCGHTTAQQLQLQIEPVYVTADASAADWRDLDKLVASQFGHGDSTAKEPSYCNPVQVFQVEGKQEDSLDYVSTSASCGGEEDLWK

SEQ ID NO: 11 - DNA, 942 bp, Medicago truncatula
atgatggagtcatgtgtcccacctggatttcggttccacccaacggatggagagcttgttggttattatctaagaaagaaagtagcttctcacaagattgatcttgatgttatcaaagagatcgatctatatcgtattgaaccctgggatctccaagagagatgtagaattgggaatgaggagcaacatgagtggtatttttttagtcacaaagataagaaatatccaacagggacgagaacgaatagagctacaatggcagggttctggaaagcaaccggaagagataagtcggtgtatgaacgaacaaaactgattggaatgaggaagacactcgttttctacaaaggaagagcacctaatggacagaaaactgattggatcatgcatgaatataggcttgaaacagttgaaaatgcacctccacaggcaagtgaagaaggttgggttgtgtgcaaagcattcaagaaaaaaacaagtgtccaagcaaaaacaaatgaaagatgggatccaagccacttacatgatgaacaaacaagtagcatcatctcaagggtggaccctattgacctcatcttaagacaaccacagaggatttcagctcaaaatttcatgtacaaacaagagatagaagcagaagcagataccttattaaggttcatgcattcagaacaattggtacctcttcctcaactacaaagtccctctttaacaaagaggcaaaactcaatgccaataatatcagagaaagtgactgattggagggatcttgacaagtttgtggcttctcagttgagtcaagaagatcataggcatgaaacaagctcagacatgtcattgttcctacttcagagtagtaaggatgatgaagagaacaagttaagctcatttttaactacaaggtcagattgtgacattggaatatgtgtatttgaaaattaa

SEQ ID NO: 12 - protein, 313 aa, Medicago truncatula
MMESCVPPGFRFHPTDGELVGYYLRKKVASHKIDLDVIKEIDLYRIEPWDLQERCRIGNEEQHEWYFFSHKDKKYPTGTRTNRATMAGFWKATGRDKSVYERTKLIGMRKTLVFYKGRAPNGQKTDWIMHEYRLETVENAPPQASEEGWVVCKAFKKKTSVQAKTNERWDPSHLHDEQTSSIISRVDPIDLILRQPQRISAQNFMYKQEIEAEADTLLRFMHSEQLVPLPQLQSPSLTKRQNSMPIISEKVTDWRDLDKFVASQLSQEDHRHETSSDMSLFLLQSSKDDEENKLSSFLTTRSDCDIGICVFEN

SEQ ID NO: 13 - DNA, 1414 bp, Arabidopsis thaliana
atgaattcattttcccacgtccctccgggttttagatttcacccgacagatgaagaacttgtagactactacctgaggaaaaaagtcgcatcgaagagaatagaaattgatttcataaaggacattgatctttacaagattgagccatgggaccttcaagagttgtgcaaaattgggcatgaagagcagagtgattggtacttctttagccataaagacaagaagtatcccacagggactcgaaccaatagagcaacaaaagcagggttttggaaagccaccggaagagataaggctatctatttgaggcatagtctaattggcatgaggaaaacacttgtgttttacaagggaagagccccaaatggacaaaagtctgattggatcatgcacgaataccgcttagaaaccgatgaaaacggaactcctcaggaagaaggatgggttgtgtgtagggttttcaagaagagattggctgcagttagacgaatgggagattacgactcatccccttcacattggtacgatgatcaactttcttttatggcctccgagctcgagacaaacggtcaacgacggattctccccaatcatcatcagcagcagcagcacgagcaccaacaacatatgccatatggcctcaatgcatctgcttacgctctcaacaaccctaacttgcaatgcaagcaagagctagaactacactacaaccacctggtacaacgaaatcatcttcttgatgaatctcatttatcgttcctccaacttcctcaactagaaagccctaagattcaacaagataacagtaattgcaactctcttccttatggaacaagcaacatcgataataactcgagccataatgctaacttgcagcaatcaaatatcgcgcatgaggaacaattgaatcaaggaaatcagaacttcagctctctatacatgaacagcggcaacgagcaagtgatggaccaagtcacagactggagagttctcgataaatttgttgcttctcagctaagcaacgaggaggctgccacagcttctgcatctatacagaataatgccaaggacacaagcaatgctgagtaccaagttgatgaagaaaaagatccgaaaagggcttcagacatgggagaagaatatactgcttctacttcttcgagttgtcagattgatctatggaagtgagctgaaagagaagacatataaatgcatatatacatatatatatatacgtacacacgaacactaatcaagtgtagatgatgatgatggtacagatttatatttgctttgattgattcttactacattattgaacttatgtcatatgcatatatacattgcgtatctatgcatatttatacttgtactcaatatgattaaccatatataaactctaatctaaatgtaa

SEQ ID NO: 14 - protein, 395 aa, Arabidopsis thaliana
MNSFSHVPPGFRFHPTDEELVDYYLRKKVASKRIEIDFIKDIDLYKIEPWDLQELCKIGHEEQSDWYFFSHKDKKYPTGTRTNRATKAGFWKATGRDKAIYLRHSLIGMRKTLVFYKGRAPNGQKSDWIMHEYRLETDENGTPQEEGWVVCRVFKKRLAAVRRMGDYDSSPSHWYDDQLSFMASELETNGQRRILPNHHQQQQHEHQQHMPYGLNASAYALNNPNLQCKQELELHYNHLVQRNHLLDESHLSFLQLPQLESPKIQQDNSNCNSLPYGTSNIDNNSSHNANLQQSNIAHEEQLNQGNQNFSSLYMNSGNEQVMDQVTDWRVLDKFVASQLSNEEAATASASIQNNAKDTSNAEYQVDEEKDPKRASDMGEEYTASTSSSCQIDLWK

SEQ ID NO: 15 - DNA, 1185 bp, Arabidopsis thaliana
atgaattcgttttcacaagtacctcctggcttcagatttcatcctactgatgaagaacttgtagactactacttgaggaaaaaagttgcatcaaagagaatagaaatcgatatcatcaaggatgttgatctttacaagattgagccatgtgatcttcaagagttatgcaagataggaaacgaagagcagagcgaatggtacttctttagtcataaagacaagaagtatcccacgggaactcgaaccaatagagccacgaaagcaggattttggaaagccactggaagagacaaggctatatatataagacatagtcttatcggtatgaggaaaacacttgtgttttacaaaggaagagccccaaatggtcagaaatccgattggatcatgcacgaatatcgcttagaaacaagtgaaaatggaacccctcaggaagaaggatgggtagtatgtagggtattcaagaagaaattggcagcgacagtgaggaaaatgggagattaccattcatcaccatcgcagcattggtacgatgatcagctctcttttatggcctccgagatcatttctagttctccacgacagtttcttcccaatcatcattataaccgccaccatcaccagcagacattgccttgtggcctcaatgcattcaacaacaacaatcctaacttgcaatgcaagcaagagctcgagttacattacaatcaaatggtacaacatcaacaacaaaaccatcatcttcgtgaatctatgtttctccagcttcctcagctcgaaagccctaccagtaattgcaattctgacaacaacaataacacaagaaatattagtaacttgcagaaatcatcaaatatatctcatgaggaacaattgcaacaagggaatcaaagtttcagctctctgtattacgatcaaggagtagagcaaatgactactgactggagagttctcgataaatttgttgcttcacagcttagcaatgatgaagaggctgcagccgtggtttcttcttcttctcatcaaaacaacgtcaagattgacacgagaaacacgggttatcatgtgatagatgagggaataaatttgccggagaatgattctgaaagggttgttgaaatgggagaagagtattcaaatgctcatgctgcttctacttcttcaagttgtcagattgatctctag

SEQ ID NO: 16 - protein, 394 aa, Arabidopsis thaliana
MNSFSQVPPGFRFHPTDEELVDYYLRKKVASKRIEIDIIKDVDLYKIEPCDLQELCKIGNEEQSEWYFFSHKDKKYPTGTRTNRATKAGFWKATGRDKAIYIRHSLIGMRKTLVFYKGRAPNGQKSDWIMHEYRLETSENGTPQEEGWVVCRVFKKKLAATVRKMGDYHSSPSQHWYDDQLSFMASEIISSSPRQFLPNHHYNRHHHQQTLPCGLNAFNNNNPNLQCKQELELHYNQMVQHQQQNHHLRESMFLQLPQLESPTSNCNSDNNNNTRNISNLQKSSNISHEEQLQQGNQSFSSLYYDQGVEQMTTDWRVLDKFVASQLSNDEEAAAVVSSSSHQNNVKIDTRNTGYHVIDEGINLPENDSERVVEMGEEYSNAHAASTSSSCQIDL

SEQ ID NO: 17 - DNA, 1095 bp, Oryza sativa
atggatggatctagtatgagcagcagcagcacgcagcagcaggcgcaggttcctcctggatttcgtttccacccgacggacgaagagctggtggattactaccttcggaagaaggtggccgcaagaaggattgatctcaatgtcatcaaggacgtcgatctctacaagattgagccatgggatctgcaagagcgttgccggatcaatggcgggtcggcggcggaggagcagaacgaatggtacttcttcagccacaaggacaagaagtacccgacggggacgaggaccaaccgtgcgacggcggccgggttctggaaggcgacggggcgagacaagcccatctacgccaccaagcagcacagcctcctcgtgggcatgaggaagacgctcgtctactaccgcggccgcgcccccaacggccacaagtccgactggatcatgcacgagtaccgcctcgagaccaccgagacggccccgccgcaggaagaagggtgggtggtatgccgggtgttcaagaagagattacccacaacaagaagagattcagaccatgacgcaccttgcggcagctggtacgttgatgaagatgcaccgggcgccttcatgtctccgatgatgatcaccagatcatcaatattgcgcccacaccaacaccacgccggcatcacgctgcaagagcaacacctccacaccacttacaagcacagagacctcactactaagattcagcagctccaagtccctgcggcaggccatcatctcctcaacaccatgccccatgacctggagagttctacttcctccttccattctcttttggtctcacctgatcaccaccaaatcaacatgcaccatgctcaggctgatcccttctttgacgacatgcatgcagtcgatcaagccactaccactgactggagagttcttgacaagtttgttgcctctcagcttagcaatgatgctacaaacaagcctgcggatcattatactgatgaaggagacattcttcaggtcagtgacaagcagcaagaggtggcagccgccgattatgcgtccacatcaacgtcaagcagccaaattgatccatggaagtga

SEQ ID NO: 18 - protein, 364 aa, Oryza sativa
MDGSSMSSSSTQQQAQVPPGFRFHPTDEELVDYYLRKKVAARRIDLNVIKDVDLYKIEPWDLQERCRINGGSAAEEQNEWYFFSHKDKKYPTGTRTNRATAAGFWKATGRDKPIYATKQHSLLVGMRKTLVYYRGRAPNGHKSDWIMHEYRLETTETAPPQEEGWVVCRVFKKRLPTTRRDSDHDAPCGSWYVDEDAPGAFMSPMMITRSSILRPHQHHAGITLQEQHLHTTYKHRDLTTKIQQLQVPAAGHHLLNTMPHDLESSTSSFHSLLVSPDHHQINMHHAQADPFFDDMHAVDQATTTDWRVLDKFVASQLSNDATNKPADHYTDEGDILQVSDKQQEVAAADYASTSTSSSQIDPWK

SEQ ID NO: 19 - DNA, 1098 bp, Arabidopsis thaliana
atggagccaatggaatcttgtagcgttcctccaggatttaggttccatccgacggacgaagagcttgtcgggtactatctaaggaagaaaatcgcatcgcaaaagattgatctcgacgtcatcagagacatcgatctctacagaatagaaccatgggatctacaagaacaatgtcgaatcggttatgaggaacaaaatgaatggtatttttttagtcacaaggacaagaaatatccaacggggacaagaactaatagagcgaccatggctggattttggaaagccacgggaagagacaaagctgtttacgacaaaacaaaactaattggtatgaggaaaacacttgtgttctacaaaggacgtgcacctaatggcaagaaatccgattggatcatgcatgagtaccggctcgagtcagatgagaatgcaccgccccaggaagaaggatgggtggtttgtagagcattcaaaaaaagagctacagggcaagccaagaacacggaaacttggagctcaagttacttttacgatgaagttgcaccgaatggagttaactcggttatggaccccattgattacatatctaagcagcaacataacatttttgggaaaggtttgatgtgtaagcaagaactagaaggaatggttgatggtataaactatatacaatcgaatcaattcattcagctcccacaactccaaagcccttctctcccgctgatgaaaagaccttcaagctcgatgtccataacatcaatggataacaattacaactataaactcccattagcggatgaagaaagcttcgagtcattcataagaggagaggatagaaggaagaagaaaaagcaagtaatgatgacgggaaattggagagagttagacaagtttgttgcttcacaacttatgagccaagaagacaatggaacttcaagtttcgcaggtcatcatatagttaatgaagataaaaacaacaatgatgtggagatggattcgtcaatgtttttgagcgaaagagaagaagaaaacaggttcgtcagtgaattcttgagtacaaactcggattatgatattgggatttgcgtatttgataattga

SEQ ID NO: 20 - protein, 365 aa, Arabidopsis thaliana
MEPMESCSVPPGFRFHPTDEELVGYYLRKKIASQKIDLDVIRDIDLYRIEPWDLQEQCRIGYEEQNEWYFFSHKDKKYPTGTRTNRATMAGFWKATGRDKAVYDKTKLIGMRKTLVFYKGRAPNGKKSDWIMHEYRLESDENAPPQEEGWVVCRAFKKRATGQAKNTETWSSSYFYDEVAPNGVNSVMDPIDYISKQQHNIFGKGLMCKQELEGMVDGINYIQSNQFIQLPQLQSPSLPLMKRPSSSMSITSMDNNYNYKLPLADEESFESFIRGEDRRKKKKQVMMTGNWRELDKFVASQLMSQEDNGTSSFAGHHIVNEDKNNNDVEMDSSMFLSEREEENRFVSEFLSTNSDYDIGICVFDN

SEQ ID NO: 21 - DNA, 1465 bp, Arabidopsis thaliana
ctttctcttcacattcaccgaaacttataaccaagatcaatatcagttctctctctcgatgaacatcatcttctacacagccatctttctttgacttcttcttcttcttcttaatataacggctcgtttcttttgtttccaaacgagtaaatagtgtcctatacacatatctataattccacaggttgaagaaaagaaataatggaatcggtggatcaatcatgtagtgttcctccgggattcagattccatccaacagatgaagagctcgttggttactatttaaggaaaaaagttgcatcgcaaaagatcgatcttgatgtcataagagatattgatctctacagaatcgaaccatgggatttacaagagagctgccgaatcggatatgaggaaagaaatgaatggtatttcttcagccacaaagataagaaatatccaacaggaacaagaacaaacagagcgaccatggctgggttttggaaagccacgggccgagacaaggctgtttacgacaagtcaaaactgattggtatgagaaaaacacttgtgttctacaaaggaagagcccctaatggccaaaaaaccgattggatcatgcatgaataccggctagagtcagatgagaatgcacctcctcaggaagaagggtgggtggtttgtagagcgttcaagaaaaagccaatgaccgggcaagccaagaacacagaaacttggagctcaagttacttttacgacgaattaccgagtggagtacgctcagttacggagcctcttaactacgtatctaagcagaaacaaaacgtttttgcacaagatttaatgttcaagcaagaactagaaggatcagatatcggtttaaacttcatccactgcgatcaattcattcaacttccgcagcttgaaagcccttcactccctcttaccaaaagaccagtgagcttgacgtcaattacatcattggagaagaataaaaatatctacaaaagacatttaatagaagaggatgtgagcttcaatgcgctaataagtagtggaaataaagataagaagaagaagaaaacatcagtgatgacgacggattggagagcactcgataaatttgttgcttctcaacttatgagccaagaagatggagtttcgggttttggaggtcatcatgaagaagataacaataaaatcggtcattacaataacgaagagagcaataacaagggatcagtagagactgcttcttccacgttattgagtgatagagaagaagagaacagattcatcagtggattattgtgttccaacttggactatgacttatatagggatttacatgtttgataaaagataacactataatatggtgcgtaacgtttgctatataggtacgtagaatttattgatacagtataacatatataaagatgtgtgaaagatttgttttcttctactatatatactttttcgtgaa

SEQ ID NO: 22 - protein, 377 aa, Arabidopsis thaliana
MESVDQSCSVPPGFRFHPTDEELVGYYLRKKVASQKIDLDVIRDIDLYRIEPWDLQESCRIGYEERNEWYFFSHKDKKYPTGTRTNRATMAGFWKATGRDKAVYDKSKLIGMRKTLVFYKGRAPNGQKTDWIMHEYRLESDENAPPQEEGWVVCRAFKKKPMTGQAKNTETWSSSYFYDELPSGVRSVTEPLNYVSKQKQNVFAQDLMFKQELEGSDIGLNFIHCDQFIQLPQLESPSLPLTKRPVSLTSITSLEKNKNIYKRHLIEEDVSFNALISSGNKDKKKKKTSVMTTDWRALDKFVASQLMSQEDGVSGFGGHHEEDNNKIGHYNNEESNNKGSVETASSTLLSDREEENRFISGLLCSNLDYDLYRDLHV

SEQ ID NO: 23 - DNA, 1101 bp, Oryza sativa; identical to SEQ ID NO: 5

SEQ ID NO: 24 - protein, 366 aa, Oryza sativa; identical to SEQ ID NO: 6

SEQ ID NO: 25 - DNA, 1047 bp, Arabidopsis thaliana
atggaaagtctcgcacacattcctcccggttatcgattccatccgaccgatgaagaactcgttgactattatctcaagaacaaagttgcattcccgggaatgcaagttgatgttatcaaagatgttgatctctacaaaatcgagccatgggacatccaagagttatgtggaagagggacaggagaagagagggaatggtatttctttagccacaaggacaagaaatatccaactgggacacgaaccaatagagcaacgggctccggattttggaaagcaacgggtcgagacaaggccatttactcaaagcaagagcttgttgggatgaggaagactcttgtcttttacaaaggtagggccccaaatggtcagaaatctgattggataatgcacgaataccgtcttgagaccgatgaaaatggaccgcctcatgaggaaggatgggtggtttgtcgcgctttcaagaagaagctaaccacgatgaactacaacaatccaagaacaatgatgggatcatcatcaggccaagaatctaactggttcacgcagcaaatggatgtggggaatggtaattactatcatcttcctgatctagagagtccgagaatgtttcaaggctcatcatcatcatcactatcatcattacatcagaatgatcaagacccttatggtgtcgtactcagcactattaacgcaaccccaactacaataatgcaacgagatgatggtcatgtgattaccaatgatgatgatcatatgatcatgatgaacacaagtactggtgatcatcatcaatcaggattactagtcaatgatgatcataatgatcaagtaatggattggcaaacgcttgacaagtttgttgcttctcagctaatcatgagccaagaagaggaagaagttaacaaagatccatcagataattcttcgaatgaaacatttcatcatctctctgaagagcaagctgcaacaatggtttcgatgaatgcttcttcctcttcttctccatgttccttctactcttgggctcaaaatacacacacgtaa

SEQ ID NO: 26 - protein, 348 aa, Arabidopsis thaliana
MESLAHIPPGYRFHPTDEELVDYYLKNKVAFPGMQVDVIKDVDLYKIEPWDIQELCGRGTGEEREWYFFSHKDKKYPTGTRTNRATGSGFWKATGRDKAIYSKQELVGMRKTLVFYKGRAPNGQKSDWIMHEYRLETDENGPPHEEGWVVCRAFKKKLTTMNYNNPRTMMGSSSGQESNWFTQQMDVGNGNYYHLPDLESPRMFQGSSSSSLSSLHQNDQDPYGVVLSTINATPTTIMQRDDGHVITNDDDHMIMMNTSTGDHHQSGLLVNDDHNDQVMDWQTLDKFVASQLIMSQEEEEVNKDPSDNSSNETFHHLSEEQAATMVSMNASSSSSPCSFYSWAQNTHT

SEQ ID NO: 27 - DNA, 879 bp, Arabidopsis thaliana
atgatgaaggttgatcaagattattcgtgtagtataccgcctggatttaggtttcatccgacagatgaagaacttgtcggatattatctcaagaagaaaatcgcctcccagaggattgatctcgacgttatcagagaaattgatctttacaagatcgaaccatgggatctacaagagagatgtaggatagggtacgaggagcaaacggagtggtatttcttcagccatagagacaagaagtatccgactgggactaggacaaaccgagccaccgtggccggtttctggaaagcaacgggccgggacaaggcggtttacctcaactccaaacttatcggtatgagaaaaacgcttgtcttttaccgaggtcgagcgcctaatggccaaaagtccgattggatcattcacgaatactacagcctcgagtcacaccagaactctcctccacaggaagaaggatgggtagtgtgtagagcatttaagaaacgaacgaccatcccaacaaaaaggaggcaactttgggatccgaactgcttattctacgacgacgccactctcttggaacctctcgacaagcgagccagacataatcctgattttaccgccacaccgttcaagcaagaactactctccgaggccagtcacgtccaggatggagatttcggatctatgtaccttcaatgcatcgatgatgatcaattctcccagcttcctcagctcgagagcccctctcttccgtcggaaataactccccatagtactactttttctgagaacagtagccggaaagatgacatgagctccgagaagaggatcactgactggagatatctagataagttcgtggcgtctcaatttttgatgagtggagaagactaa

SEQ ID NO: 28 - protein, 292 aa, Arabidopsis thaliana
MMKVDQDYSCSIPPGFRFHPTDEELVGYYLKKKIASQRIDLDVIREIDLYKIEPWDLQERCRIGYEEQTEWYFFSHRDKKYPTGTRTNRATVAGFWKATGRDKAVYLNSKLIGMRKTLVFYRGRAPNGQKSDWIIHEYYSLESHQNSPPQEEGWVVCRAFKKRTTIPTKRRQLWDPNCLFYDDATLLEPLDKRARHNPDFTATPFKQELLSEASHVQDGDFGSMYLQCIDDDQFSQLPQLESPSLPSEITPHSTTFSENSSRKDDMSSEKRITDWRYLDKFVASQFLMSGED

SEQ ID NO: 29 - DNA, 927 bp, Oryza sativa
ccatcttaattttttacttctttacttaattatctgtcctactatatatgttaattcatggatattaatatggaatatggatgcaggaggaaggttgggtggtttgccgcgcgtttcagaagccgatgcccaaccagcagcagcacaggctgtcctacggctgcatccccggcagctacggcgccggagcctacgccgccgtccccgacaactacagcttgctgctgcaccacgacaaccctagcttcgccgggcggccattgatgagcgccgctgcctcagctctcttcgccaacaacaacaataacagcgtcgtcgaccacagcaacattctgagttcagagtccaagcttcacttctccgacatgatgccgcctctggagagccccaccatcgtcgacggcgagggctacgtctcgcaggctagcagctgcgtcgacgtcgatcagcaagccggcatcgtcgactggaacctgctcaccagcttgctgccgccgccggcgcatcagctcttccaccacctgccttccgcttcgggagttattacaagtagagtgagaggagacggcgcggcggcggcggcggcggcgggatggagagggagaaccgggtggagaccatctcccggctggcccagtggcgcatcgacaccttcggcccctcctcctaccgccgctccgattccttcaagatcggcatctggaactggttcccttcccaatcccaatcccccactactcagagatcaccgatttgccctatcaaatcaaatcatccgccaattcgatccgaatccgtgcaggtacctatcggtggagaaggctcgatatgtatacgtggggctgttcccggagcccgggcgggtggccaaggaacggcccccgctcgcccgcttccttctccgagcttgctggtccggccccaatg

SEQ ID NO: 30 - protein, 282 aa, Oryza sativa
MQEEGWVVCRAFQKPMPNQQQHRLSYGCIPGSYGAGAYAAVPDNYSLLLHHDNPSFAGRPLMSAAASALFANNNNNSVVDHSNILSSESKLHFSDMMPPLESPTIVDGEGYVSQASSCVDVDQQAGIVDWNLLTSLLPPPAHQLFHHLPSASGVITSRVRGDGAAAAAAAGWRGRTGWRPSPGWPSGASTPSAPPPTAAPIPSRSASGTGSLPNPNPPLLRDHRFALSNQIIRQFDPNPCRYLSVEKARYVYVGLFPEPGRVAKERPPLARFLLRACWSGPN

SEQ ID NO: 31 - DNA, 1168 bp, Arabidopsis thaliana
atcttgtttcttactcatttctctaacaattttccaaattaaatacgtttataggatcatcgtggatggataatataatgcaatcgtcaatgccaccgggattccgatttcatccgacagaggaagagcttgtgggttattacctagataggaagatcaattcaatgaagagtgctttagatgtcattgtagagattgatctctacaaaatggagccatgggatatacaagcgaggtgtaaactagggtatgaagagcaaaacgagtggtacttctttagtcataaggacaggaagtaccctaccgggactaggaccaaccgagccactgcggctgggttctggaaagccacgggtagagacaaggcggtactatcaaaaaacagtgtcatcggaatgcggaagacacttgtctactacaagggtcgagctcctaatggaagaaagtccgattggatcatgcacgaataccgtctccaaaactccgagcttgccccggttcaggaggaaggctgggtggtgtgtcgagcatttaggaagccaattccaaaccagaggccattagggtacgagccatggcagaaccagctctaccacgtcgaaagtagtaacaactactcatcttcagtgacaatgaacacgagtcatcatatcggtgcatcttcatcaagtcataaccttaatcaaatgctcatgagcaataaccactacaatcctaataatacatcctcatcgatgcatcaatatggcaacattgagctcccgcagttggacagcccgagcttgtcgcctagtttagggacgaataaagatcagaacgagagtttcgagcaagaagaagagaagagctttaactgtgtggattggagaacactagataccttgcttgagacacaagtcatacatccgcataaccctaatattcttatgttcgaaacgcagtcgtataatccggcgccaagcttcccttccatgcatcaaagctataatgaggtcgaagctaatattcatcattctcttggatgcttccctgactcgtaattaaaaaaaaacacacttctatatattgatttgtattctatgatttaattgttccatctggaaaataacatttataactgtctatttgtaaaagaagtttgtgtttattacgtagaaatttgttgttg

SEQ ID NO: 32 - protein, 324 aa, Arabidopsis thaliana
MDNIMQSSMPPGFRFHPTEEELVGYYLDRKINSMKSALDVIVEIDLYKMEPWDIQARCKLGYEEQNEWYFFSHKDRKYPTGTRTNRATAAGFWKATGRDKAVLSKNSVIGMRKTLVYYKGRAPNGRKSDWIMHEYRLQNSELAPVQEEGWVVCRAFRKPIPNQRPLGYEPWQNQLYHVESSNNYSSSVTMNTSHHIGASSSSHNLNQMLMSNNHYNPNNTSSSMHQYGNIELPQLDSPSLSPSLGTNKDQNESFEQEEEKSFNCVDWRTLDTLLETQVIHPHNPNILMFETQSYNPAPSFPSMHQSYNEVEANIHHSLGCFPDS

SEQ ID NO: 33 - DNA, 549 bp, Oryza sativa
atgcagccgccgcggagctccatcggagcatgggaggcgagctactcctaccacgaccccgccgtcttcgtcggcggcggggaacacttcaagcaagaggccgcggccgagctggacggcgtcgccgccgccgccggagctaacgccttcctgcggtactccacccgcctggccgagctcccgcagctggagagcccgccgctgccaagccaggggagccaggcggcctcggccgtcgtcgacggcgaggaagataacgccgattctagcaggcgccctggcggcggcggcggcgccgccgccgcggtgaccacggactggagggcgttcgacaagttcgtcgcgtcccagctcagccccgaggagcagcacacctgccgggccaccgacgacgacgacatggcagcgctgctgctcctcgacggcggcgggcaggaggacgacgccgggaggtggctgggctccgccgggttgctgagcgccgtggcggccgacgcgacgacggactgcggcctcggcaccagctgcgtgcctggcgacatcaactga

SEQ ID NO: 34 - protein, 182 aa, Oryza sativa
MQPPRSSIGAWEASYSYHDPAVFVGGGEHFKQEAAAELDGVAAAAGANAFLRYSTRLAELPQLESPPLPSQGSQAASAVVDGEEDNADSSRRPGGGGGAAAAVTTDWRAFDKFVASQLSPEEQHTCRATDDDDMAALLLLDGGGQEDDAGRWLGSAGLLSAVAADATTDCGLGTSCVPGDIN

SEQ ID NO: 35 - DNA, 1074 bp, Zinnia elegans
atggacacaatgaatcaatcatcatgtactgtccctccaggttttcgttttcatcctaccgatgaagaacttgttggttactatctcagaaagaaggttgcatctcaaaagattgatcttgatgtcattaaagacatcgatctttatcgaatcgaaccatgggatcttatagagagatgtcggatcggatacgaggagcaaaatgagtggtatttcttcagtcacaaggataaaaagtatccaacagggacaaggacaaatagggcaactatggcaggtttttggaaggcaacgggtagagacaaagctgtttacgaaaaactaaggctcataggaatgagaaaaaccctagttttctacaaaggaagggcaccaaatggccagaaaaccgattggatcatgcacgagtacaggctcgaatctgaagaaaatggacctcctcaggaagaaggatgggtagtatgtcgagcattcaagaaacgtgcaaccggacaaacaagaacaacaccagcatgggaatcaaattacttcttagatgaatcaagcctccttacatccacaatggatgattacaccacaattcaaccttcaaatattcctttgacatcaagtttcatgtgcaagcaagagttggaagcatcagaaaatttgaactttattcattgtgatcagtttattcaacttccacacctcgaaagcccatccctccaatcgataaaacggcctataagctccatactatatgaacatgatcaacaagaagacgatcaaatcacaaaaagaatcacaaacaacgttaggagtaaagatgaagtgagggattggagggatcttgataagtttgtagcttctcaattgagccaagaggaagagattcgatgtgtcgaagaagggttttcaacgaatttccaagagaacattgatcattctactagtttgagtcatatgtttaattatcaagatggtattgaagaatacagtggttgtgacaaagggggcaagttaaatggattcttgagttcaacaagctcagatcattttgatgttggaatttgcatatttgataaattatga

SEQ ID NO: 36 - protein, 357 aa, Zinnia elegans
MDTMNQSSCTVPPGFRFHPTDEELVGYYLRKKVASQKIDLDVIKDIDLYRIEPWDLIERCRIGYEEQNEWYFFSHKDKKYPTGTRTNRATMAGFWKATGRDKAVYEKLRLIGMRKTLVFYKGRAPNGQKTDWIMHEYRLESEENGPPQEEGWVVCRAFKKRATGQTRTTPAWESNYFLDESSLLTSTMDDYTTIQPSNIPLTSSFMCKQELEASENLNFIHCDQFIQLPHLESPSLQSIKRPISSILYEHDQQEDDQITKRITNNVRSKDEVRDWRDLDKFVASQLSQEEEIRCVEEGFSTNFQENIDHSTSLSHMFNYQDGIEEYSGCDKGGKLNGFLSSTSSDHFDVGICIFDKL

SEQ ID NO: 37 - DNA, 1283 bp, Zea mays
atgcatccaggtgttggaccattgtcggtgccaccaggcttccgcttccatccgactgatgaggagctcctctactactacctgaggaaaaaggttgcttatgagcccatagatcttgatgtcataagggagattgatctcaataagcttgagccctgggatctcaaagaaagatgcaaaataggcactgggcctcaaaacgagtggtacttcttcagccacaaggacaagaagtactcaacgggaacgagaacgaaccgtgccacgacggcgggattctggaaggcgactggccgagacaaggccatcttccttggcagcgccaggaggatcggcttgagaaagaccctggtgttctatatcggcagggcgccgcacgggaagaagactgagtggatcatgcacgagtaccgccttgatgaagagaacgttgaaattcaggaagatggatgggtggtatgtagggttttcaagaagaagaactatgagcagagaggccacaacatggctgagatggcggcactggacgacgatgagctccagcctttcacggttcctgtcgtccctgctggcactagctccctgccaacaacagaccacaagaacaaccctcacctcatgcaatatgacttcccttctttcgacccttccatgcagctcccacagctgatgagcgccgaccagcccgtgccaaccctattccccagccatcctggcgtcgccacggccatgagctcatcaatcgacgttgagtgctcgcagaacctgctgacgatgctgacatccaacggcagcgacgggatgctccacgtccgcgctggtggtgctggagctggtgtcgaccgcttcgctggcacgacagattggtcgatcctagacaagctcctcgcctcgcaccagaacctcggacagctcttccacggcaaggtcaccgcagcatctgcctccccaatggctccataccatcagcagctcatggaactcgggtggctcgtcgtcgtcgtcgtccttgcagaggcttccactgcagtacctcagcggcgagacgaccgatctcctcaggttccccaagtaattattggatcgacctcaagtttagctaccttgttgagcagtgaccatatcaggattttggttgactactaggctgcttaattcggcctacttcgtatggagtttagtgcttttaaatgtatatatggtgcaactgtttggggcatgcaggcatggaatgccatcgatctaccatggttgcttgcttggccaaaaaaaaaaaaaaaaaa

SEQ ID NO: 38 - protein, 381 aa, Zea mays
MHPGVGPLSVPPGFRFHPTDEELLYYYLRKKVAYEPIDLDVIREIDLNKLEPWDLKERCKIGTGPQNEWYFFSHKDKKYSTGTRTNRATTAGFWKATGRDKAIFLGSARRIGLRKTLVFYIGRAPHGKKTEWIMHEYRLDEENVEIQEDGWVVCRVFKKKNYEQRGHNMAEMAALDDDELQPFTVPVVPAGTSSLPTTDHKNNPHLMQYDFPSFDPSMQLPQLMSADQPVPTLFPSHPGVATAMSSSIDVECSQNLLTMLTSNGSDGMLHVRAGGAGAGVDRFAGTTDWSILDKLLASHQNLGQLFHGKVTAASASPMAPYHQQLMELGWLVVVVVLAEASTAVPQRRDDRSPQVPQVIIGSTSSLATLLSSDHIRILVDY

SEQ ID NO: 39 - DNA, 2193 bp, Oryza sativa
aatccgaaaagtttctgcaccgttttcaccccctaactaacaatatagggaacgtgtgctaaatataaaatgagaccttatatatgtagcgctgataactagaactatgcaagaaaaactcatccacctactttagtggcaatcgggctaaataaaaaagagtcgctacactagtttcgttttccttagtaattaagtgggaaaatgaaatcattattgcttagaatatacgttcacatctctgtcatgaagttaaattattcgaggtagccataattgtcatcaaactcttcttgaataaaaaaatctttctagctgaactcaatgggtaaagagagagattttttttaaaaaaatagaatgaagatattctgaacgtattggcaaagatttaaacatataattatataattttatagtttgtgcattcgtcatatcgcacatcattaaggacatgtcttactccatcccaatttttatttagtaattaaagacaattgacttatttttattatttatcttttttcgattagatgcaaggtacttacgcacacactttgtgctcatgtgcatgtgtgagtgcacctcctcaatacacgttcaactagcaacacatctctaatatcactcgcctatttaatacatttaggtagcaatatctgaattcaagcactccaccatcaccagaccacttttaataatatctaaaatacaaaaaataattttacagaatagcatgaaaagtatgaaacgaactatttaggtttttcacatacaaaaaaaaaaagaattttgctcgtgcgcgagcgccaatctcccatattgggcacacaggcaacaacagagtggctgcccacagaacaacccacaaaaaacgatgatctaacggaggacagcaagtccgcaacaaccttttaacagcaggctttgcggccaggagagaggaggagaggcaaagaaaaccaagcatcctcctcctcccatctataaattcctccccccttttcccctctctatataggaggcatccaagccaagaagagggagagcaccaaggacacgcgactagcagaagccgagcgaccgccttcttcgatccatatcttccggtcgagttcttggtcgatctcttccctcctccacctcctcctcacagggtatgtgcccttcggttgttcttggatttattgttctaggttgtgtagtacgggcgttgatgttaggaaaggggatctgtatctgtgatgattcctgttcttggatttgggatagaggggttcttgatgttgcatgttatcggttcggtttgattagtagtatggttttcaatcgtctggagagctctatggaaatgaaatggtttagggtacggaatcttgcgattttgtgagtaccttttgtttgaggtaaaatcagagcaccggtgattttgcttggtgtaataaaagtacggttgtttggtcctcgattctggtagtgatgcttctcgatttgacgaagctatcctttgtttattccctattgaacaaaaataatccaactttgaagacggtcccgttgatgagattgaatgattgattcttaagcctgtccaaaatttcgcagctggcttgtttagatacagtagtccccatcacgaaattcatggaaacagttataatcctcaggaacaggggattccctgttcttccgatttgctttagtcccagaattttttttcccaaatatcttaaaaagtcactttctggttcagttcaatgaattgattgctacaaataatgcttttatagcgttatcctagctgtagttcagttaataggtaatacccctatagtttagtcaggagaagaacttatccgatttctgatctccatttttaattatatgaaatgaactgtagcataagcagtattcatttggattattttttttattagctctcaccccttcattattctgagctgaaagtctggcatgaactgtcctcaattttgttttcaaattcacatcgattatctatgcattatcctcttgtatctacctgtagaagtttctttttggttattccttgactgcttgattacagaaagaaatttatgaagctgtaatcgggatagttatactgcttgttcttatgattcatttcctttgtgcagttcttggtgtagcttgccactttcaccagcaaagttc

SEQ ID NO: 40 - DNA, 1179 bp, Oryza sativa
ttgcagttgtgaccaagtaagctgagcatgcccttaacttcacctagaaaaaagtatacttggcttaactgctagtaagacatttcagaactgagactggtgtacgcatttcatgcaagccattaccactttacctgacattttggacagagattagaaatagtttcgtactacctgcaagttgcaacttgaaaagtgaaatttgttccttgctaatatattggcgtgtaattcttttatgcgttagcgtaaaaagttgaaatttgggtcaagttactggtcagattaaccagtaactggttaaagttgaaagatggtcttttagtaatggagggagtactacactatcctcagctgatttaaatcttattccgtcggtggtgatttcgtcaatctcccaacttagtttttcaatatattcataggatagagtgtgcatatgtgtgtttatagggatgagtctacgcgccttatgaacacctacttttgtactgtatttgtcaatgaaaagaaaatcttaccaatgctgcgatgctgacaccaagaagaggcgatgaaaagtgcaacggatatcgtgccacgtcggttgccaagtcagcacagacccaatgggcctttcctacgtgtctcggccacagccagtcgtttaccgcacgttcacatgggcacgaactcgcgtcatcttcccacgcaaaacgacagatctgccctatctggtcccacccatcagtggcccacacctcccatgctgcattatttgcgactcccatcccgtcctccacgcccaaacaccgcacacgggtcgcgatagccacgacccaatcacacaacgccacgtcaccatatgttacgggcagccatgcgcagaagatcccgcgacgtcgctgtcccccgtgtcggttacgaaaaaatatcccaccacgtgtcgctttcacaggacaatatctcgaaggaaaaaaatcgtagcggaaaatccgaggcacgagctgcgattggctgggaggcgtccagcgtggtggggggcccacccccttatccttagcccgtggcgctcctcgctcctcgggtccgtgtataaataccctccggaactcactcttgctggtcaccaacacgaagcaaaaggacaccagaaacatagtacacttgagctcactccaaactcaaacactcacacca

SEQ ID NO: 41 - protein, 11 aa, Artificial sequence
  NAC transcription factor motif I
  VARIANT (1)..(1): Xaa is Pro, Arg, Gly or Lys
  VARIANT (2)..(2): Xaa is Ser, Met or Ile
  VARIANT (3)..(3): Xaa is Ala or Asp
  VARIANT (4)..(4): Xaa is Ile, Val or Leu
  VARIANT (6)..(6): Xaa is Val, Phe or Ile
  VARIANT (8)..(8): Xaa is Val, Arg, Lys or Gln
  VARIANT (9)..(9): Xaa is Asp or Glu
  VARIANT (10)..(10): Xaa is Ile, Val or Leu
XXXXDXIXXXD

SEQ ID NO: 42 - protein, 14 aa, Artificial sequence
  NAC transcription factor motif II
  VARIANT (2)..(2): Xaa is Arg or Lys
  VARIANT (3)..(3): Xaa is Leu, Ile or Tyr
  UNSURE (5)..(7): Xaa can be any naturally occurring amino acid or a gap
  VARIANT (8)..(8): Xaa is Tyr, Asn or Gly
  VARIANT (9)..(9): Xaa is Glu or Asp
  VARIANT (11)..(11): Xaa is Arg or Gly
  VARIANT (12)..(12): Xaa is Asn, Ser or Thr
CXXGXXXXXEXXEW

SEQ ID NO: 43 - protein, 11 aa, Artificial sequence
  NAC transcription factor motif III
  VARIANT (7)..(7): Xaa is Val or Ala
  UNSURE (9)..(9): Xaa can be any naturally occurring amino acid, preferably Gln, Arg or Lys
  UNSURE (11)..(11): Xaa can be any naturally occurring amino acid, preferably Pro, Arg or Lys
GWVVCRXFXKX

SEQ ID NO: 44 - DNA, 30 bp, Artificial sequence
  primer: adapter primer
aagcagtggtatcaacgcagagtacgcggg

SEQ ID NO: 45 - DNA, 26 bp, Artificial sequence
  primer: OsNAM2-2
ctctccagaggcggcatcatgtcgga

SEQ ID NO: 46 - DNA, 18 bp, Artificial sequence
  primer: OsNAM2-1
tgatcgggatgaggaaga

SEQ ID NO: 47 - DNA, 21 bp, Artificial sequence
  primer: OsNAM2-3
gatcagtctcggtcatcgatg

SEQ ID NO: 48 - DNA, 53 bp, Artificial sequence
  primer: prm08733
ggggacaagtttgtacaaaaaagcaggcttaaacaatggatcggcatgaggag

SEQ ID NO: 49 - DNA, 48 bp, Artificial sequence
  primer: prm08734
ggggaccactttgtacaagaaagctgggttcgatcgatcagtctcggt

SEQ ID NO: 50 - DNA, 1016 bp, Oryza sativa
tcacaacccacaacattttcaaacaacgcaaagcagtagcagcagcgagaagcaagcaagaagcgatggggatggggatgaggagggagagggacgcggaggcggagctgaacctgccgccggggttcaggttccaccccacggacgacgagctggtggagcactacctgtgcaggaaggcggcggggcagcgcctgccggtgccgatcatcgccgaggtggatctctacaagttcgacccgtgggatctgcccgagcgcgcgctgttcggcgccagggagtggtacttcttcaccccgcgggatcgcaagtatcctaatgggtcacgccccaaccgcgccgccggcaacgggtactggaaggccaccggcgccgacaagcccgtcgcgccgcgggggcgcacgcttgggatcaagaaggcgctcgtgttctacgccggcaaggcgccgcgaggggtcaagactgattggatcatgcatgagtaccggctcgccgatgctggccgcgccgccgcgggcgccaagaagggatctctcaggttggatgattgggtgctgtgtcggctgtacaacaagaagaacgagtgggagaagatgcagcaggggaaggaggtgaaggaggaggcgtccgacatggttacgtcgcagtcgcactcgcacacccactcgtggggcgagacgcgcacgccggagtcggagatcgtggacaacgaccccttcccggagctggactcgttcccggcgttccagcctgcgccgccgccggcgacggcgatgatggtgcccaagaaagaatcgatggacgacgccaccgcggccgccgccgccgccgccaccatccccaggaacaacagcagcctgttcgtggacctgagctacgacgatatccagggcatgtacagcggcctcgacatgctgccgccgggcgacgacttctactcgtcgctcttcgcgtcgccgcgggtgaaggggacgacgccacgcgccggcgccggcatgggcatggtcccgttctga

SEQ ID NO: 51 - protein, 316 aa, Oryza sativa
MGMGMRRERDAEAELNLPPGFRFHPTDDELVEHYLCRKAAGQRLPVPIIAEVDLYKFDPWDLPERALFGAREWYFFTPRDRKYPNGSRPNRAAGNGYWKATGADKPVAPRGRTLGIKKALVFYAGKAPRGVKTDWIMHEYRLADAGRAAAGAKKGSLRLDDWVLCRLYNKKNEWEKMQQGKEVKEEASDMVTSQSHSHTHSWGETRTPESEIVDNDPFPELDSFPAFQPAPPPATAMMVPKKESMDDATAAAAAAATIPRNNSSLFVDLSYDDIQGMYSGLDMLPPGDDFYSSLFASPRVKGTTPRAGAGMGMVPF

SEQ ID NO: 52 - DNA, 1423 bp, Oryza sativa
tcgacccacgcgtccgctcttcccaacactagtaggataaagccacagagagagcagtagtagtagcgagctcgccggagaacggacgatcaccggagaagggggagagagatgagcggcggtcaggacctgcagctgccgccggggttccggttccacccgacggacgaggagctggtgatgcactacctctgccgccgctgcgccggcctccccatcgccgtccccatcatcgccgagatcgacctctacaagttcgatccatggcagcttccccggatggcgctgtacggagagaaggagtggtacttcttctccccgcgagaccgcaagtacccgaacgggtcgcggccgaaccgcgccgccgggtcggggtactggaaggcgaccggcgccgacaagccggtgggctcgccgaagccggtggcgatcaagaaggccctcgtcttctacgccggcaaggcgcccaagggcgagaagaccaactggatcatgcacgagtaccgcctcgccgacgtcgaccgctccgcccgcaagaagaacagcctcaggttggatgattgggtgctgtgccggatttacaacaagaagggcgggctggagaagccgccggccgcggcggtggcggcggcggggatggtgagcagcggcggcggcgtccagaggaagccgatggtgggggtgaacgcggcggtgagctccccgccggagcagaagccggtggtggcggggccggcgttcccggacctggcggcgtactacgaccggccgtcggactcgatgccgcggctgcacgccgactcgagctgctcggagcaggtgctgtcgccggagttcgcgtgcgaggtgcagagccagcccaagatcagcgagtgggagcgcaccttcgccaccgtcgggcccatcaaccccgccgcctccatcctcgaccccgccggctccggcggcctcggcggcctcggcggcggcggcagcgaccccctcctccaggacatcctcatgtactggggcaagccattctagacgaccaaaaaaaaaaaaaaacaaccgcattggcagcaatggtgtcactgaacaccgtgcaggctagctagcttcatggccggtgaactttgactcaggcgagccgccggagttgactcaaagataattaaaagaagtgttttaagtggattggattggattagacagaggagatgaggactcgagaaaggcggcgatgagaccgtggttggggggaccctggcctggactgaacgacgacgaggcagcagcagaaagatggtgcaattgcatcgggtggcatgtcagtgtgtgtgtatagtggcatgtacatagtacatggtgattgattcggtatacagggggctagctttcctgtttctgtttaaaaaaaaaaaaaaaaaaaaaaaaaaaaaaaaaa

SEQ ID NO: 53 - protein, 303 aa, Oryza sativa
MSGGQDLQLPPGFRFHPTDEELVMHYLCRRCAGLPIAVPIIAEIDLYKFDPWQLPRMALYGEKEWYFFSPRDRKYPNGSRPNRAAGSGYWKATGADKPVGSPKPVAIKKALVFYAGKAPKGEKTNWIMHEYRLADVDRSARKKNSLRLDDWVLCRIYNKKGGLEKPPAAAVAAAGMVSSGGGVQRKPMVGVNAAVSSPPEQKPVVAGPAFPDLAAYYDRPSDSMPRLHADSSCSEQVLSPEFACEVQSQPKISEWERTFATVGPINPAASILDPAGSGGLGGLGGGGSDPLLQDILMYWGKPF

SEQ ID NO: 54 - DNA, 1751 bp, Oryza sativa
cccctcgaggtcgacccacgcgtccgcttccattagcgactaatccagccttcgttaagggtgattagaatttgattaatttcaaggcctcagatcggagattgaatggagtgcggtggtgcgctgcagctgccgccggggttcaggttccacccgacggacgacgagctggtgatgtactacctgtgccgcaagtgcggcggcctccccctcgccgccccggtgatcgccgaggtggacctctacaagttcaacccatgggatctccccgagagggcgatgggaggggagaaggagtggtacttcttctcgccgcgggaccggaagtacccgaacgggcagcggccgaacagggcggcggggacggggtactggaaggcgacgggggcggacaagccggtggggtcgccgcgggcggtggcgatcaagaaggcgctcgtcttctacgccgggaagccgcccaagggcgtcaagaccaactggatcatgcacgagtaccgcctcgccgacgtcgaccgctccgccgccgcccgcaagctctccaagtcctcccacaacgccctcaggttggatgattgggtgttgtgccgaatctacaacaagaagggagtgatcgagaggtacgacacggtggacgccggcgaggacgtgaagccggcggcggcggcggcggcggcgaagggtggtcgcatcggcggcggcggcggcgcggcggcgatgaaggtggagctctccgactatgggttctacgaccaggagccggagtcggagatgctgtgcttcgaccggtcggggtcggcggaccgcgactcgatgccgcggctgcacaccgactccagcgggtcggagcacgtgctgtcgccgtcgccgtcgccggacgacttccccggcggcggcgaccacgactacgccgagagccagcccagcggcggatgcggcgggtggcccggcgtcgactgggccgccgtcggcgacgatggcttcgtcatcgacagctccctcttcgagctgccctcgccggcggcgttctcccgcgccgccggcgacggcgccgccttcggcgacatgttcacgtacctgcagaagccgttctaattaacggaacgtgacgcctctgcaaacgctaattagctcactaaccactgtcaggtcgatcgtgtaattcttttaccagtctagggtacagccaaaaaaccaaaaattaaccgtgctcgatcgatcgatcgatccatggatcgatgatcgcctccaccggcagatcaaaatcgaagcaaaaaatcagggagaattcttggtacttccagtacctctcgtcgacaccacgtgtcgggttttctgcaccgcggatcctcgctggccgcatcgtaacggcgagcgaggttaaaaatagtggagaattcaagaacacatccctgatttttgtttctgccggatggggagtaccgtgagcatggtagaaatgactggtaaaattttcgttgatgataggtagccagagtcgatgtaaccagtcgattttttttttttttggttttagttgacatgccttcctgatagattcagaacaaacaatagagaagagaggagaaaaaaacacagaggagaaattcagagaccaaagttcaaagttttggaattttcaggggcgccagcagctgatggtattgtcagtcgtgtctaggttcgtagaggaaattaaaatgtagaagaacgggtacttcagttcacttcaaaaaaaaaaaaaaaaaaaa

SEQ ID NO: 55 - protein, 329 aa, Oryza sativa
MECGGALQLPPGFRFHPTDDELVMYYLCRKCGGLPLAAPVIAEVDLYKFNPWDLPERAMGGEKEWYFFSPRDRKYPNGQRPNRAAGTGYWKATGADKPVGSPRAVAIKKALVFYAGKPPKGVKTNWIMHEYRLADVDRSAAARKLSKSSHNALRLDDWVLCRIYNKKGVIERYDTVDAGEDVKPAAAAAAAKGGRIGGGGGAAAMKVELSDYGFYDQEPESEMLCFDRSGSADRDSMPRLHTDSSGSEHVLSPSPSPDDFPGGGDHDYAESQPSGGCGGWPGVDWAAVGDDGFVIDSSLFELPSPAAFSRAAGDGAAFGDMFTYLQKPF

SEQ ID NO: 56 - DNA, 1336 bp, Oryza sativa
atcctccacaagagaaactaggatcttcaagtatagctagcattgcgccctcatttcatccatggcaatgcagctgtccttgcctgtcttgccaacgggttttcgtttccatccaaccgatgaggaactagtcatcaactacctccagaggcgtgctaccgggctatcgtgccccatccccataatcgcggatgtcgaaatatacaacttcaacccgtgggagcttccatccatggctctatttggggaacatgagtggtacttttttacactacgcgaccacaggtaccccaatagtgtgcgccctagtcgctcagcggcgtcaggcttttggaaggccaccggcactgacaagcccgtccaagttgctaacatgcaaagcactcctgtagctatgaagaaggcacttgtattctatgttggccgcccgcccatggaaaccaagactacatggatcatgcatgagtaccgtctcacaaacacgggagggtccactgcctcccacccatccttgtcttcatccaccgcacacccttctgtgaagctagacgagtgggtgctatgcaagatcttcaacaagtccccagagccggacaacaccgcaccaccatcaaacgtcgtctcacggttacagtgctcgccgccgctgccgccgccggcggcaccgcccggcaactacccgccgctgccggtgggtgcgacgaacgacggcggcgtgttcgcctgcgccggcgacatgctcttcaccatccaagagcaccaggagggaacaccatcgatgctgccgccgatccctaaccttgagccaccggcggcaacaattgggaattcctctctcaatggcactgctgctgctgctgctgctgctgatggccatggccgccttgaggaagaggacaccagcgcctacaccttcaccgaccaggaaatggagcagatgctcatggacctgatggaccaggatttctttggcaatgatcaaccccaggagtgaactgtgtggtggagtgattttcatatcattccatagctctgatctgtgctggagagtgaatttagtatctattgtaccagatagaataaaaccagaaaagaaataaaagaaggccaaagaaaaaagcaaaaagaaaattgtataattactaggtttggatgccgtctgtagaaccttgtgtgctatgtaacttttttctttgtattttggcattttcatcatattgtgtcataaataaagcagggctttcttttgtagtttgccatctcaatcttgcaccgtgatgttataaaaaaacaaaattaattattgtgctacactgtacttttggctgtgttcggc

SEQ ID NO: 57 - protein, 310 aa, Oryza sativa
MAMQLSLPVLPTGFRFHPTDEELVINYLQRRATGLSCPIPIIADVEIYNFNPWELPSMALFGEHEWYFFTLRDHRYPNSVRPSRSAASGFWKATGTDKPVQVANMQSTPVAMKKALVFYVGRPPMETKTTWIMHEYRLTNTGGSTASHPSLSSSTAHPSVKLDEWVLCKIFNKSPEPDNTAPPSNVVSRLQCSPPLPPPAAPPGNYPPLPVGATNDGGVFACAGDMLFTIQEHQEGTPSMLPPIPNLEPPAATIGNSSLNGTAAAAAAADGHGRLEEEDTSAYTFTDQEMEQMLMDLMDQDFFGNDQPQE

SEQ ID NO: 58 - DNA, 1176 bp, Oryza sativa
atgccgagcagcggcggcgccatgcctgcccttccaccaggcttccgcttccaccccaccgacgaggagctcatcgttcactacctcatgaaccaggccgcctccgtcaagtgccccgtgccaatcatcgccgaggtcaacatctacaagtgcaacccatgggaccttcctggtaaggctttgttcggcgagaacgaatggtacttcttcagcccgagggaccgcaagtaccccaacggcgctcgccccaaccgcgccgccggctcggggtactggaaggccaccggcaccgacaagtccatcctctccactccgaccagcgacaacatcggcgtcaagaaggccctcgtcttctacaagggcaagcctcccaagggcgtcaagaccgactggatcatgcacgagtaccgtctcaccggcacatcagctaacagcaccaccaccacaaagcagcgtagagcgtcatccatgaccatgaggctggacgactgggtgctgtgcagaatccacaagaagagcaacgacttcaattcctctgaccaacacgaccaagaacccgaggaatcaaccgtcgaacagcttgaagacatccatgacaacaactcctctgaacaacctccagctccagctgacatgaacaaccaacagtcagatttccagcccatgacggcgatgagcatgagcaagtcatgctccctcaccgatctcctcaacaccatcgactgcgccgcgctctcgcagtttctcctcgacggctcatccgacgccatcgctgagcctcctgctcctcccagccccctaatatacacaacacctcatccaaattaccaaacactaaactataacattaacagcaacagcagcatgccacacgccttcgagtcacgcctagatcatcacgatggttacgttaacaattataatgttaatggcctgaggaggaagagaatgatggcgtgtagtgcaacttcctttgatgatggcagcagcagcaatgactttgtgcatgccgttgtcaagaaaccgcagctgctgccaagtgattcgaggggtagtggttttggaggaggttactgcaaccagcagctttcagagactgcgactggctttcagtttcagaacggcaatctgctgagccatccatttcctctgaacaatcatctgcagatgcagtag

SEQ ID NO: 59 - protein, 391 aa, Oryza sativa
MPSSGGAMPALPPGFRFHPTDEELIVHYLMNQAASVKCPVPIIAEVNIYKCNPWDLPGKALFGENEWYFFSPRDRKYPNGARPNRAAGSGYWKATGTDKSILSTPTSDNIGVKKALVFYKGKPPKGVKTDWIMHEYRLTGTSANSTTTTKQRRASSMTMRLDDWVLCRIHKKSNDFNSSDQHDQEPEESTVEQLEDIHDNNSSEQPPAPADMNNQQSDFQPMTAMSMSKSCSLTDLLNTIDCAALSQFLLDGSSDAIAEPPAPPSPLIYTTPHPNYQTLNYNINSNSSMPHAFESRLDHHDGYVNNYNVNGLRRKRMMACSATSFDDGSSSNDFVHAVVKKPQLLPSDSRGSGFGGGYCNQQLSETATGFQFQNGNLLSHPFPLNNHLQMQ

SEQ ID NO: 60 - DNA, 1450 bp, Triticum aestivum
acgaggcactcgccccaatctcgaacaacggccgtcggatccatcatcatcggcagcggagcgattccatcgaccagctttctacagacggacatggggatgccggccgtgaggaggagggagagggacgcggaggcggagctcaacctgccccccggcttccgcttccaccccaccgacgacgagctcgtcgagcactacctctgccgcaaggcggcggggcagcgcctcccggtccccatcatcgccgaggtcgacctctaccgcttcgacccctgggcgctccctgaccgcgccctcttcggcacccgcgagtggtacttcttcaccccccgcgaccgcaagtaccccaacggctcccgacccaaccgcgccgccggcaacggctactggaaggccaccggcgccgacaagcccgtcgcgccccgcggcgggcggaccatggggatcaagaaggccctcgtgttttacgcgggcaaggcgcctaagggggtcaagaccgactggatcatgcatgagtatcgcctcgccgacgccggccgcgccgccgccagcaagaagggctcgctcaggctggacgactgggtgctctgccggctctacaacaagaagaacgagtgggagaagatgcagctgcagcagcaaggggaagaggagacgatgatggagcccaaggcggagaacacggcctccgacatggtggtcacctcgcactcccactcgcagtcccagtcgcactcgcactcgtggggcgaggcgcgcacgccggagtcggagatcgtcgacaacgacccgtcgctgttccagcaggcgacggcggcggcgttccaggcccagagccccgcggccgccgcggcgcaccaggagatgatggccacgctgatggtgcccaagaaggaggcggcggacgaggccggcaggaacgacctcttcgtcgacctcagctacgacgacatccagagcatgtacaacggcctcgacatgatgccgcccggggacgacctgctctactcctccctcttcgcctccccccgtgtccgcgggagccagcccggcgccggcggcatgccggccccgttctaagcagagcaaagacagagaccgtcagagaccccgagatcgacagaagtggaatggacgacttcttggccgcgagcgagcgagaccgcggtgcagtgtaaatacagcataggaaacgggagggagggaggtggcgtcgtgtcgagagaagccggcgtcgtgccggggcgtgccgttgtacatggagagcccggcgccggggcctggccggctgggttgattcttttgttcttactaccttgtactctcaatgcggatgtagctctttcttctcactcctcactagtagaatcgaccgaccgaatacatatgtagctctgttctttccttctcttcagtagaaatcaaccaaattttgctgttatgctgc

SEQ ID NO: 61 - protein, 329 aa, Triticum aestivum
MGMPAVRRRERDAEAELNLPPGFRFHPTDDELVEHYLCRKAAGQRLPVPIIAEVDLYRFDPWALPDRALFGTREWYFFTPRDRKYPNGSRPNRAAGNGYWKATGADKPVAPRGGRTMGIKKALVFYAGKAPKGVKTDWIMHEYRLADAGRAAASKKGSLRLDDWVLCRLYNKKNEWEKMQLQQQGEEETMMEPKAENTASDMVVTSHSHSQSQSHSHSWGEARTPESEIVDNDPSLFQQATAAAFQAQSPAAAAAHQEMMATLMVPKKEAADEAGRNDLFVDLSYDDIQSMYNGLDMMPPGDDLLYSSLFASPRVRGSQPGAGGMPAPF

SEQ ID NO: 62 - DNA, 1141 bp, Zea mays
  variation (1084)..(1084): n is a, c, g or t
gcacgaggaacccgcccacaggacaggacacacagagccgagccaccccacccaccatcggcgaccagcagccagccgcgggagcgagctgtttaaagacaccgagtcggagtcggacggaggactggcaggcacaaccgaagccaccgcttctagttctcgggttcatcgccagcaatccagaccacataatgggacagccggtgacgaggaggagggagagggacgcggaggcggagctggacctgccgccggggttccggttccaccccacagacgacgagctggtggagcactacctgtgccgcaaggcggcggggcagcgcctccccgtgcccatcatcgccgaggtggacctgtacaggttcgacccgtgggacctgccggagcgcgcgctcttcggggcccgggagtggtacttcttcacgcccagggaccgcaagtaccccaacggctcccgccccaaccgcgccgccggcgacgggtactggaaggccaccggcgccgacaagcccgtcgcgccgcgcgccgccgccgccgacgcccgcacgctcgggatcaagaaggcgctcgtcttctacgccggcaaggcgccgcgcggggtcaagacagactggatcatgcacgagtacaggctcgctgacgccggcggacgcgccaagaaggggtcgctcaggttggatgactgggtgctgtgccggctgtacaacaagaagaacgagtgggagaagatgcggctggggaagggggcagccgccggcgcagtcaaagaggaggaggccatggacatgagcacctcccactcgcagatcacccactcgtggggcgagacgcgcacgccggagtcggagatcgtggacaacgacctgccgttcccggatccggcgatgatggtgcccaagaaggagcgggtggacgacggcggcagcgccaggaccagcgacctgttcgtggatctcagctacgacgacatccaaggcatgtacagcggcctcgacatgctgccgccggccggcgaggacttgtactcctcgctcttcgcgtcgcccagggtcagggggaaccagcccaccggacccgcggngttgggccccttctgagtgagctcaggcgaagatggaggcatggagatcaggagaga

SEQ ID NO: 63 - protein, 302 aa, Zea mays
  UNSURE (298)..(298): Xaa at position 298 can be any amino acid
MGQPVTRRRERDAEAELDLPPGFRFHPTDDELVEHYLCRKAAGQRLPVPIIAEVDLYRFDPWDLPERALFGAREWYFFTPRDRKYPNGSRPNRAAGDGYWKATGADKPVAPRAAAADARTLGIKKALVFYAGKAPRGVKTDWIMHEYRLADAGGRAKKGSLRLDDWVLCRLYNKKNEWEKMRLGKGAAAGAVKEEEAMDMSTSHSQITHSWGETRTPESEIVDNDLPFPDPAMMVPKKERVDDGGSARTSDLFVDLSYDDIQGMYSGLDMLPPAGEDLYSSLFASPRVRGNQPTGPAXLGPF

SEQ ID NO: 64 - DNA, 1090 bp, Triticum aestivum
aattcggcacgagacagtccaccacgcacgtgcagcagcaccagcgcccgagaatcccattcccatcgacggagaagaagaagtgaagaaacaatggtgatggcagcggcggagcggcgggacgcggaggcggagctgaacctgccgccggggttccggttccacccgacggacgaggagctggtggcggactacctctgcgcgcgcgcggccggccgcgcgccgccggtgcccatcatcgccgagctcgacctctaccggttcgacccgtgggagctcccggagcgggcgctcttcggggcgcgggagtggtacttcttcacgccgcgggaccgcaagtaccccaacggctcccgccccaaccgggccgccgggggcggctactggaaggccaccggcgccgacaggcccgtggcgcgcgcgggcaggaccgtcgggatcaagaaggcgctcgtcttctaccacggcaggccgtcggcgggggtcaagacggactggatcatgcacgagtaccgcctcgccggcgccgacggacgcgccgccaagaacggcggcacgctcaggcttgacgaatgggtgctctgccgcctatacaacaagaagaaccagtgggagaagatgcagcggcagcggcaggaggaggaggcggcggccaaggctgcggcgtcacagtcggtctcctggggtgagacgcggacgccggagtccgacgtcgacaacgatccgttcccggagctggactcgctgccggagttccagacggcaaacgcgtcaatactgcccaaggaggaggtgcaggagctgggcaacgacgactggctcatggggatcagcctcgacgacctgcagggccccggctccctgatgctgccctgggacgactcctacgccgcctcgttcctgtcgccggtggccacgatgaagatggagcaggacgtcagcccattcttcttctgagctctcaatactctcacggtcgcactgttgtgtgcggcgtaactgtagatagttcacatttgttcaggatttatttgtaacgttgcttcttttatacgatactctcttcctttctaaaaaaaaaaaaaaaaaa

SEQ ID NO: 65 - protein, 287 aa, Triticum aestivum
MVMAAAERRDAEAELNLPPGFRFHPTDEELVADYLCARAAGRAPPVPIIAELDLYRFDPWELPERALFGAREWYFFTPRDRKYPNGSRPNRAAGGGYWKATGADRPVARAGRTVGIKKALVFYHGRPSAGVKTDWIMHEYRLAGADGRAAKNGGTLRLDEWVLCRLYNKKNQWEKMQRQRQEEEAAAKAAASQSVSWGETRTPESDVDNDPFPELDSLPEFQTANASILPKEEVQELGNDDWLMGISLDDLQGPGSLMLPWDDSYAASFLSPVATMKMEQDVSPFFF

SEQ ID NO: 66 - DNA, 1255 bp, Oryza sativa
catccaacaacccaccaccctcattccctcaagtcccaagatcgaacacctcgtgtccatggcggcggcgaagcggcgagtgcgcgacgcggaggcggacctgaacctcccgccgggcttccgcttccaccccaccgacgaggagctggtggcgcactacctctgcccgcgcgccgcgggccgcgccgccccggtccccatcatcgccgagctcgacctctaccgccacgacccatgggacctcccccaccgcgccctcttcggccgccgcgagtggtacttcttcaccccgcgcgaccgcaagtaccccaacggctcccgccccaaccgcgccgccgcctcgggctactggaaggccaccggcgccgacaagcccgtgctgcacaacggcaggacggccgggatcaagaaggcgctcgtgttctaccacggcaagcccccccgcggcgtcaagacggagtggatcatgcacgagtaccgcctcgccaagaagggcggcgccgccgccgccgcgggcgcgggcgcgctcaggctggatgactgggtgctgtgccggctgtacaacaagaagaacgagtgggagaagatgcagagcaggaaggaggaggaggaggccatggcggcggcgcagtcgtggggggagacgcggacgccggagtcggaggtcgtcgacagcgacgcgttcccggagatggactactcgctgccggcggcgtcgttcgacgacgccctgctgcccaaggaggaggcgcgcgacgacgactggctcatggggatgagcctcgacgacctccagggcctcggctcgctgctgcaggccgacgacctctccatgctcgcgccgccgccggcggcgaagacggagccgctcggcgcgccattcttctgagctctctctctctctctctctctctctctctctgtgactgcaccactgtatataaattcagagttttcagacatgttcagtattcagagttctcaggcaagttcagaattcagagatggttaaggattagtggcttatgagcagtatgatatgcaggttagtttctagtttagcagtgttactccagattggagatttgattaatgatttgattctaattaatgtagtatactgagtgttactcatcatcacagattcatcagagctgtgtcaagtgacaattctttttttttttatttcctggatcaagttcaccatgttgtgctcaagatttgtggataaatgcacatccatccttgaattggc

SEQ ID NO: 67 - protein, 276 aa, Oryza sativa
MAAAKRRVRDAEADLNLPPGFRFHPTDEELVAHYLCPRAAGRAAPVPIIAELDLYRHDPWDLPHRALFGRREWYFFTPRDRKYPNGSRPNRAAASGYWKATGADKPVLHNGRTAGIKKALVFYHGKPPRGVKTEWIMHEYRLAKKGGAAAAAGAGALRLDDWVLCRLYNKKNEWEKMQSRKEEEEAMAAAQSWGETRTPESEVVDSDAFPEMDYSLPAASFDDALLPKEEARDDDWLMGMSLDDLQGLGSLLQADDLSMLAPPPAAKTEPLGAPFF

SEQ ID NO: 68 - DNA, 1683 bp, Elaeis guineensis
aggcagaaatctcaccgccgcctcagccatttctaaagcttggtacaaggaacggtaatcctccaggcaatcgagttgcgaggacgctgacaatggggagcaggagaagagatgctgaggcggagctcaacctgccgccgggattccggttccacccgaccgacgaggagctcgtcgttcattacctctgcaagaaggtggcctgccagcgcctgcccgtgcccatcatcgccgaggtcgatctctacaaatatgacccatgggatctgccagagaaggcgttgttcgggctaaaagagtggtatttcttcacccctcgtgatcgaaagtacccgaatggctcgaggcctaacagggccgccgggagggggtactggaaggcgaccggtgctgataaacccgtgaccccgaaggggagcagtaggcctctcgggatcaagaaagccttggtgttttactctgggaaggcaccaagaggagtgaagactgattggatcatgcatgagtacaggcttgccgacacgaaccgagcagccaacaagaagggaagcctaaggcttgatgactgggttctttgccggttgtacaacaagaagaacacctgggagaagatgcagcaacaaaaggaggcagcatcgtttggagagacgatggattctgtggatgacacaggatcggacagcttcagaacacccgaatcggacatagataacgatgtcatgttcccggactttgacgatatggctcaggttggagctcacccacctcaagctttcaatggaatgcaaggagtacgagtcaacaatataactgggtatcagccagcaatagagcagcgtccaaaagaggagaatgactggttcacggacctgaatctggatgacttccacagtacatgcatggcttttggatcaacacctgctctcgatatgtcggaccatgattactactactcaaaccttccacaactgagatcaaaccagagtgacctgctacccttctaaagctacgaatcccagctgtatataagtgaaaataggcaggaggtgacaatctagtggtagaactctgtaggattcttttgtttccaccaattttatataggtaaatccattcataagcaagggacagtcgctgatgtacatatgataatattattttgtggtagaccttctgtttgaattagttttacaaattttgagcattgtctagtggtagaatatcttcgtttcgattacagaaacttgcctcagcaacaggaaacatattccacacacacacacacacaaaaaaagaaaagcagcagcaggaatcagaataagttatagatggtgggataatcttaagtgacagtatataacactgcgcacaaaaaggtggacagtgagaactcaaaggagaatcagccgtggcatgcggtcatagttattcgttcagagagacagtttatagcatctgcttgggatctttgtttagtgcgacacaaccaacagtaggaacaaagaatatctgtggacatccacaagtccagggtagtatcgaggaaacaagcaacgttgtgtcgatttgacaagagtgaccctccaaatgttaagttttctggaagaggggaaagaagtggaagcataagcgcatgcataagcaagcacatcaccagcgaaagcaaaaaaaaaaaaaaaaaaa

SEQ ID NO: 69 - protein, 303 aa, Elaeis guineensis
MGSRRRDAEAELNLPPGFRFHPTDEELVVHYLCKKVACQRLPVPIIAEVDLYKYDPWDLPEKALFGLKEWYFFTPRDRKYPNGSRPNRAAGRGYWKATGADKPVTPKGSSRPLGIKKALVFYSGKAPRGVKTDWIMHEYRLADTNRAANKKGSLRLDDWVLCRLYNKKNTWEKMQQQKEAASFGETMDSVDDTGSDSFRTPESDIDNDVMFPDFDDMAQVGAHPPQAFNGMQGVRVNNITGYQPAIEQRPKEENDWFTDLNLDDFHSTCMAFGSTPALDMSDHDYYYSNLPQLRSNQSDLLPF

SEQ ID NO: 70 - DNA, 1264 bp, Oryza sativa
gcagcatcaacaaaggcagcagcagcagcagcagcagcagcagcgttggtggtggtggtgtgtcatcaccaacattttcacgagaggagaaggatggaaatggcggcggcggttgggggcagcgggaggagggacgcggaggcggagctgaacctgccgccgggcttccgtttccacccgaccgacgaggagctcgtggtgcactacctctgccgcaaggttgcccggcagccgctccccgtcccaatcatcgccgaggtcgacctctacaagctcgacccctgggatctccctgagaaggcgttgttcgggaggaaagagtggtacttcttcacgccgagggaccggaagtacccgaacgggtcgaggccgaaccgcgcagcggggagagggtactggaaggcgacgggagccgacaagccggtggcgcccaaggggagcgcgaggacggtggggatcaagaaggcgctcgtgttctactccgggaaggcgccgaggggggtcaagacggactggatcatgcacgagtaccgcctcgccgacgccgaccgcgccccgggcggcaagaagggctcacagaagctggacgagtgggtgctgtgccggctgtacaacaagaagaacaactgggagaaggtgaagctggagcagcaggacgtggcctccgtggcggcggcggcgccgcgcaaccaccaccatcagaacggcgaggtcatggacgcggcggcggctgacaccatgtccgacagcttccagacgcacgactccgacatcgacaacgcctccgccggcctgcggcacggtggctgcggcggcggcggcttcggcgacgtggcgccgccgaggaatgggttcgtgacggtgaaggaggacaacgactggttcaccggcctcaacttcgacgagctgcagccgccgtacatgatgaacctgcagcacatgcagatgcagatggtgaatccggcggcgccagggcacgacggcggctacttgcagtccatcagctcgccgcagatgaagatgtggcagacaatcctgccaccattctgagatggatggagcaagaaaaaggttgctgtagataaagggcggaaataggagtgatggctagaaaattattagatttactagaacgaaaatgattagaaatctggcaagcatgattctgcaaatgtggtggtagatgcttgcagtatgtaattcatttgttcagtatatgcatttggtaatctgcaaaacaaaaaaaaaaaaaaaaaaaaaaaaa

SEQ ID NO: 71 - protein, 316 aa, Oryza sativa
MAAAVGGSGRRDAEAELNLPPGFRFHPTDEELVVHYLCRKVARQPLPVPIIAEVDLYKLDPWDLPEKALFGRKEWYFFTPRDRKYPNGSRPNRAAGRGYWKATGADKPVAPKGSARTVGIKKALVFYSGKAPRGVKTDWIMHEYRLADADRAPGGKKGSQKLDEWVLCRLYNKKNNWEKVKLEQQDVASVAAAAPRNHHHQNGEVMDAAAADTMSDSFQTHDSDIDNASAGLRHGGCGGGGFGDVAPPRNGFVTVKEDNDWFTGLNFDELQPPYMMNLQHMQMQMVNPAAPGHDGGYLQSISSPQMKMWQTILPPF

SEQ ID NO: 72 - DNA, 1129 bp, Glycine max
ttccagagttggtgttagtcttggtgtagtgtagctagggagggatatatatctgagtaagatggcatcagagcttgaattgcccccaggcttcagattccatccaacggacgaggagctggtgttgcactatctctgccgcaaatgcgcgtcgcagccaatcgccgttcccatcatcgccgaaatcgacctctacaaatacgacccctgggacttacccggattggctacttatggagagaaagagtggtacttcttttcaccacgggaccggaaatacccaaacggttcgaggccgaaccgggcggctggcaccggttactggaaggcaaccggggcggataagcccattggtcagcccaaaccggttgggattaaaaaagctttggtgttttacgcagggaaagctcctaaaggggacaaaagcaattggatcatgcacgagtatcgtctcgcagacgtagatcgctccgttcgcaaaaagaacaccctaaggttggatgattgggtgctttgccgtatttacaacaagaagggcacgatcgagaaactgcaaccaagcagcgatgttgctcatagccgaaatatcgaatcctcggagatcgaagacaggaagccggagattctgaaaagcggaggaggttgtcttccgccgcctgcgccggtgcctgcgccgccgcaagcgacggcgaagacggattacatgtacttcgacccgtcggattcaatcccgaagctgcacacggactcgagctgttcggagcaggtggtatcgccgggattcgcgagcgaggtgcaaagcgagcccaagtggaacgagtgggagaaaagcctcgaatttccatttaattacgtggatgccactctcaacaacagcttcatggcccaattccagggcaataatcagatgttgtcgccgctgcaggacatgttcatgtactggcccaacaagtccttttgagcacatcatgatggttttaaattacgatccacaattgctcttaagattttctgactcaccatgcgaccacaatcgtaatttaaaaccatgtcacataaaatccacgcgcgccgcccattcgcatttgcacggtagcacgagactcaaggtccatgagtgtgcctgtaa

SEQ ID NO: 73 - protein, 299 aa, Glycine max
MASELELPPGFRFHPTDEELVLHYLCRKCASQPIAVPIIAEIDLYKYDPWDLPGLATYGEKEWYFFSPRDRKYPNGSRPNRAAGTGYWKATGADKPIGQPKPVGIKKALVFYAGKAPKGDKSNWIMHEYRLADVDRSVRKKNTLRLDDWVLCRIYNKKGTIEKLQPSSDVAHSRNIESSEIEDRKPEILKSGGGCLPPPAPVPAPPQATAKTDYMYFDPSDSIPKLHTDSSCSEQVVSPGFASEVQSEPKWNEWEKSLEFPFNYVDATLNNSFMAQFQGNNQMLSPLQDMFMYWPNKSF

SEQ ID NO: 74 - DNA, 1304 bp, Lycopersicon esculentum
ggcacgagcaaagcaggagcaggagcagcaacaaacagagagaagaaaacagaggaagataagaggaaaatttatcgaattcgaatcgagagaaaaggggaagtgaagttgcgaagagtgagaatttcaaaggaaatgaacaaaggagcaaacggaaatcagcaattggagttaccggcgggattcagattccatccgacagacgacgaattggtgcagcactatctctgcaggaaatgcgccggacagtcgattgctgtatcaattatagctgaaattgatctttacaagtttgatccatggcagttgcctgagaaggctttgtacggtgaaaaagagtggtattttttctcaccaagggatagaaaatatccgaacggttcacggccgaaccgagcagcaggaaccggttattggaaggcaaccggagctgataaaccggtgggaaaacccaaaaccttagggataaagaaggcacttgtgttctatgccggaaaagcacccagaggtataaaaacaaattggattatgcacgagtaccgcctcgccaacgtggaccgctctgctggcaagaacaataacttgaggcttgatgattgggtattgtgtcgaatatacaacaagaaaggcacacttgagaagcattacaatgtggacaacaaggaaactacaagctttggagaatttgatgaagaaataaaaccaaaaatattgcccacacaattagcaccgatgccaccacggcctcgatcgacaccagcaaacgactacttttatttcgagtcatcagagtcgatgactagaatgcacacgacaaactcgagctctggctcagagcatgtcttgtcgccatgtgacaaggaggttcagagcgcgcccaaatgggacgaagaccacagaaacacccttgattttcagctaaactatttggatggtttactaaatgaaccatttgaaacccaaatgcagcagcaaatttgcaactttgaccagttcaacaatttccaagacatgttcctatacatgcaaaaaccttactaaaattgtataaattcattggatctaaattgagtgtgatccatgacattttctttgttctttggtggtgtaggtcaactttttattaagtagtttagagaagtacaaaatgctagtcaaatttggtgggctacagcacaaatgagccttgataagcatagccaaagagtcgtatagaagggcttattattattgtaaggtatgtaaaaacaaatgaaaatttgttaatatcaagttatcattcttcaaaaaaaaaaaaaaaaaaa

SEQ ID NO: 75 - protein, 301 aa, Lycopersicon esculentum
MNKGANGNQQLELPAGFRFHPTDDELVQHYLCRKCAGQSIAVSIIAEIDLYKFDPWQLPEKALYGEKEWYFFSPRDRKYPNGSRPNRAAGTGYWKATGADKPVGKPKTLGIKKALVFYAGKAPRGIKTNWIMHEYRLANVDRSAGKNNNLRLDDWVLCRIYNKKGTLEKHYNVDNKETTSFGEFDEEIKPKILPTQLAPMPPRPRSTPANDYFYFESSESMTRMHTTNSSSGSEHVLSPCDKEVQSAPKWDEDHRNTLDFQLNYLDGLLNEPFETQMQQQICNFDQFNNFQDMFLYMQKPY

SEQ ID NO: 76 - DNA, 1060 bp, Brassica napus
cgaagaaaagagaagacttttgaaaaaaaaaatgaaagcagggctaaacttaccagcaggattccgattccacccaacggacgaagagcttgtgcaattctacctttgccggaaatgcgcatcggaggagatctcagctccggtcatcgccgaaatcgatctctacaagttcaacccctgggagcttcctgagatgtctctgtacggagagaaagagtggtacttcttctcgccacgagaccggaaatacccaaacggttcgcgtcctaaccgggcggcgggaaccggttattggaaagccaccggagctgataaaccgatcggtaaaccgaagacgctgggtattaagaaagcgctcgtgttctacgcagggaaagctcccaaagggattaagacgaattggattatgcacgagtatcgcctcgctaatgtggacagatcagcttctgttaacaaaaagaacaaccttcgacttgatgattgggtgttatgtcgaatctacaacaagaaagggaccatggagaagtactaccctgctgatgagaaaccgatgaccgtgacggcggcttcatcgcctttcgatgcgtcggactcgacttacccgacgttgcaagaggatgactcgagcagctcggggggtcgcgtggtgtcgccggatgcgcgggaggtgcagagcgagcctaaatggggggagtttgagaatgcttttgatgcttccatgttcggtggtggctccatggacttgctgcagagtgaagattttgtgcctcagttcttgtaccagccttcttatgatttcaactcctggcaggaggatccgccggagcagaaaccgttcttgaattggagttttgctccacaggggtgaaaaaggaagagagtgaaaggttttttggtctgtgttgtgatatgtgttagagagaagttctcaatcatcttttgtttcttagtagtgagagaaagattgtagagtgttgatagtttcttagcatcttcaatgtttcattggcaggtgaattcttgttatttcatcagaaatttatatgaaaaattatacctt

SEQ ID NO: 77 - protein, 278 aa, Brassica napus
MKAGLNLPAGFRFHPTDEELVQFYLCRKCASEEISAPVIAEIDLYKFNPWELPEMSLYGEKEWYFFSPRDRKYPNGSRPNRAAGTGYWKATGADKPIGKPKTLGIKKALVFYAGKAPKGIKTNWIMHEYRLANVDRSASVNKKNNLRLDDWVLCRIYNKKGTMEKYYPADEKPMTVTAASSPFDASDSTYPTLQEDDSSSSGGRVVSPDAREVQSEPKWGEFENAFDASMFGGGSMDLLQSEDFVPQFLYQPSYDFNSWQEDPPEQKPFLNWSFAPQG

SEQ ID NO: 78 - DNA, 969 bp, Oryza sativa
atgagcggcggcggcgaaggggcggcggcggcggagaggcaggagctgcagctgccgccggggttcaggttccacccgacggacgaggagctggtgatgcactacctctgccggcggtgcgccggcctccccatcgccgtccccatcatcgccgaggtcgacctctacaagttcgatccatggcatctcccaagaatggcgctgtacggcgagaaggagtggtacttcttctcccctcgggaccgcaagtacccgaacgggtcgcggccgaaccgcgccgccgggtccgggtactggaaggccaccggcgccgacaagccggtgggcacgccgaggccggtggccatcaagaaggcgctcgtcttctacgccggcaaggcgcccaagggcgacaagaccaactggatcatgcacgagtaccgcctcgccgacgtcgaccgctccgcccgcaagaagaacaccctccggctagatgattgggtcctgtgccgaatctacaacaagaaaggcggcgtggagaagccgagcggcggcggcggcggcgaacgttcgaatatgatgagccacggggagaccgcgtcggcgggctcgccgccggagcagaagccggccgtgctgccgccgccgccaccgccgtacgcggcggcggcgccgttctcggagctggcggcgttctacgacgtgcggccgtcggactcggtgccgcgggcgcacggcgcggactcgagctgctcggagcacgtgctgacgacgtcggcgtcgtccggcggcgtcgtcgagcggccggaggtgcagagccagcccaagatcgccgagtgggagcgcacgttcgccggcgccgccgccccggctggcgccgtcagcacggccggaccgattctgggccagctcgaccccgccgccgccgtcgccggcggcggcgacccgctcctccaggacatcctcatgtactggggcaagccgttctga

SEQ ID NO: 79 - protein, 322 aa, Oryza sativa
MSGGGEGAAAAERQELQLPPGFRFHPTDEELVMHYLCRRCAGLPIAVPIIAEVDLYKFDPWHLPRMALYGEKEWYFFSPRDRKYPNGSRPNRAAGSGYWKATGADKPVGTPRPVAIKKALVFYAGKAPKGDKTNWIMHEYRLADVDRSARKKNTLRLDDWVLCRIYNKKGGVEKPSGGGGGERSNMMSHGETASAGSPPEQKPAVLPPPPPPYAAAAPFSELAAFYDVRPSDSVPRAHGADSSCSEHVLTTSASSGGVVERPEVQSQPKIAEWERTFAGAAAPAGAVSTAGPILGQLDPAAAVAGGGDPLLQDILMYWGKPF

SEQ ID NO: 80 - DNA, 1295 bp, Solanum tuberosum
ggtcaaacaactgaaactaacaaagcagcagcagcagcaacaaacagagaagacaacagaggaagataaacaaaggaaattaagagggagatttatcgaatcgaaagggaaagggaagttacgaagagtgagaatttgaaggaaatgaacaaaggagcaaccggaaatcagcaattggagttaccggcgggattcagattccatccgacagacgacgaattggtgcagcattatctctgcaggaaatgtgccggacagccaattgcagtatcaattataactgaaattgatctttacaagtttgatccatggcagttgcctgaaaaggctttgtacggtgaaaaggagtggtattttttctcaccaagggatagaaaatatcctaacggttcacggccgaaccgagcagcaggaaccggttattggaaggcaaccggagcagataaaccggtgggaaaacccaaaacattagggataaagaaggcacttgtgttttatgctggaaaagcacctagaggaataaaaaccaattggattatgcatgagtaccggctcgccaatgtggaccggtctgctggcaagaacaataacttgaggcttgatgattgggtattgtgtcgaatttacaacaagaaaggcacacttgagaagcattacaatgtggacaacaaggaaactgcaagctttggagaatttgatgaagaaataaaaccaaaaatattgcccacacaattagcacagatgccaccacggccccgatcgacaccgacaaacgactacttccatttcgaatcatcggagtcgatgactagaatgcacaccacaaactcgagctctggctcagagcatgtcttgtcgccatgtgacaaggaggttcagagcgcgcccaaatgggacgaagaccacagaaacacccttgattttcagctaaattatctggatggtttactaaatgaaccatttgaaacccaaatgcagcagcaaagttgcaactttgaccagttcaacaatttccaagacatgttcttttacatgcaaaagccttactaaaattgtataaattcattggatctaaattgattgtgatccatgacattttctttgttctttggtggtgtaggtcaacttttattaattagtttagaaaagtacaaaatgcaagtcaaatttggtgggctgtaatgagcctttgataagcatagccaaagagtcatatagaagggcttattaatgttattattgtaaggtacatgtaaaacaaatgaaaatttgttaatatcaagttatcattcttc

SEQ ID NO: 81 - protein, 301 aa, Solanum tuberosum
MNKGATGNQQLELPAGFRFHPTDDELVQHYLCRKCAGQPIAVSIITEIDLYKFDPWQLPEKALYGEKEWYFFSPRDRKYPNGSRPNRAAGTGYWKATGADKPVGKPKTLGIKKALVFYAGKAPRGIKTNWIMHEYRLANVDRSAGKNNNLRLDDWVLCRIYNKKGTLEKHYNVDNKETASFGEFDEEIKPKILPTQLAQMPPRPRSTPTNDYFHFESSESMTRMHTTNSSSGSEHVLSPCDKEVQSAPKWDEDHRNTLDFQLNYLDGLLNEPFETQMQQQSCNFDQFNNFQDMFFYMQKPY

SEQ ID NO: 82 - DNA, 1447 bp, Arabidopsis thaliana
cgattacaatcttgagcagacgaagaaaacccaaaaaaaatccagatccagctgaaattgaattttcaaccaacgaagaagagatttttccaagagcaacagacaagaagaagagaatgaagtcggagctaaatttaccagctgggttccgattccatccaacggacgaggagcttgtgaaattctacttgtgccggaaatgtgcttccgagcagatctcggctccggttatcgccgagattgatctctacaagttcaatccttgggagcttccagagatgtctctgtacggagagaaagagtggtacttcttctcacctagagatcggaaatacccaaacggttcgcgtcctaaccgggcagcaggaaccggttattggaaagctaccggagcagataaaccgattggtaaaccgaagacgttgggtatcaagaaagcactcgtcttctacgcagggaaagctccaaaagggattaagaccaattggataatgcatgagtatcgtctcgctaatgttgatagatcagcttctgttaacaaaaagaacaacctacgacttgatgattgggttttatgtcgaatatacaacaagaaaggaaccatggagaagtatttccccgcggatgagaagccgaggaccacgacaatggctgaacagtcatcatcaccttttgatacatcagactcgacttacccgacattgcaagaggatgattccagcagctcaggtggtcacggtcacgtggtgtcaccggatgttttggaggttcagagcgagcctaaatggggagagcttgaggatgctttggaagcttttgatacttcaatgtttggtagttccatggagttgttgcagcctgacgcttttgtccctcagttcttgtatcagtctgattatttcacttccttccaggatccgcctgagcagaaaccattcttgaattggagttttgctccacaggggtaaaaacggaagagaccaaaaaaggtgtttgctagtagtactgtgatgtgccagagagaagagtctcatctcaactcatccctggctcttagtagtaaaagaagattgtagaatgttaatagcttttagcatcaatgtctcattagcaggcacattcttgttctttcatgagaagtttatatgaaaactaaaaatttatattcaaattcttcaagatgttgcacttatgtagatactgatattaaataacaacctaacctttatgagatatcatgctctccggaagcattttttgatgagtatcatcagctgaatcgaggcgatttcctcacagctgttattcctatgtctctgagacttttgattctcgttttcttgacctgaggtttctttttggaagacttctctctttccttctgttcaagctgtgtggagggtttttcagatccattattcccacgaggagtcttcattttgggatc

SEQ ID NO: 83 - protein, 283 aa, Arabidopsis thaliana
MKSELNLPAGFRFHPTDEELVKFYLCRKCASEQISAPVIAEIDLYKFNPWELPEMSLYGEKEWYFFSPRDRKYPNGSRPNRAAGTGYWKATGADKPIGKPKTLGIKKALVFYAGKAPKGIKTNWIMHEYRLANVDRSASVNKKNNLRLDDWVLCRIYNKKGTMEKYFPADEKPRTTTMAEQSSSPFDTSDSTYPTLQEDDSSSSGGHGHVVSPDVLEVQSEPKWGELEDALEAFDTSMFGSSMELLQPDAFVPQFLYQSDYFTSFQDPPEQKPFLNWSFAPQG

SEQ ID NO: 84 - DNA, 1211 bp, Petunia x hybrida
  misc_feature (1006)..(1006): n is a, c, g, or t
  misc_feature (1131)..(1131): n is a, c, g, or t
  misc_feature (1154)..(1154): n is a, c, g, or t
  misc_feature (1157)..(1157): n is a, c, g, or t
  misc_feature (1187)..(1187): n is a, c, g, or t
  misc_feature (1194)..(1194): n is a, c, g, or t
  misc_feature (1199)..(1199): n is a, c, g, or t
cccattctcagtatctagacacccaaaaataaaaataaaaagatttattattttttcatcaagaaattcgttagaaaaatcaaaaaatgacaacagcagaattgcaattacctccagggtttagatttcacccaactgatgaagaacttgtgatgcactatttatgtagaaaatgtgcttcacaaccaattgctgtaccaattattgctgaaattgatctctacaaatatgacccatgggatcttcctgatttggcattgtatggggagaaagaatggtatttcttttcacctagggaccgaaagtatccgaacggttcacgaccaaatcgagcagctggaacaggttattggaaagccactggagctgataaaccaattggacatcctaaggcagttggaattaaaaaggcattggtgttttacgctggcaaggctccgaaaggcgagaaaacaaattggattatgcacgaatacagacttgctgatgttgatcgatctgctcgtaagaataacaatagcttaaggctagatgattgggttttgtgccgaatctacaacaaaaagggctcaattgaaaagaatcaactcaataacaagaaaataatgaatactagctatatggatatgacagtatcaagtgaagaagaccgaaagccagagattctaccaccgctaccacctcagcctgcgccgcaacagcaacaagtttataacgattttttctacctggatccatcagattcagtaccaaaaatccactcagattcaagctgctcggaacatgtggtttcaccagagttcacttgtgagagagaagttcagagcgaagccaagttaagtgagtgggaaaaagctgcccttgatcttccatttaattacatggatgccactactggagctaccacactggataatagccttttaggttcacagtttcagagcagttatcagatgtcgccattgcaggatatgttcatgcacctgcacaaacctttttaaggtcnaaagtgaaggaatcaatcattttacggccgcatgtttgttaaaatgagactaagttaaagttcccgtgacttgcgcacgttgcgggctgtttataggaattagttaccatccttttgggtttccncattgggcaatttgtttaaaacnacntttttgtgttatatagttttaataatgttnccccctnaattnatttaaaaaaaa

SEQ ID NO: 85 - protein, 304 aa, Petunia x hybrida
MTTAELQLPPGFRFHPTDEELVMHYLCRKCASQPIAVPIIAEIDLYKYDPWDLPDLALYGEKEWYFFSPRDRKYPNGSRPNRAAGTGYWKATGADKPIGHPKAVGIKKALVFYAGKAPKGEKTNWIMHEYRLADVDRSARKNNNSLRLDDWVLCRIYNKKGSIEKNQLNNKKIMNTSYMDMTVSSEEDRKPEILPPLPPQPAPQQQQVYNDFFYLDPSDSVPKIHSDSSCSEHVVSPEFTCEREVQSEAKLSEWEKAALDLPFNYMDATTGATTLDNSLLGSQFQSSYQMSPLQDMFMHLHKPF

SEQ ID NO: 86 - DNA, 1295 bp, Prunus mume
acacacagcacagtcgaatcaaacgacgccgttcagaatgtcctcctccgatttacagctgccgcccggcttcaggttccacccgacggacgaagagctcgtgaagcactacctctgccgcaaatgccagtcgcagccgatttcggtcccgataatcgccgaaatcgatctctacaaatacaacccctgggacctccctggtttggcgttgtacggtgagaaagagtggtatttcttttcgccgagggaccggaagtatccgaatggttcgaggccgaaccgggcggccgggagcggctattggaaggcgaccggagcggataagccgatcgggagcccgaagccagtcgggattaagaaggccctggttttctacgccggaaaagctccgagaggagagaagaccaattggattatgcacgagtatcgcctcgccgacgtcgaccgctcgcctcgcaaaaagagcagcagcctaaggttggacgattgggttctgtgtcgcatatacaacaaaaagggcaccgtcgagaaacagcagcagcagcaacaacagcaacaacagcaaacgacgagtcgtatgagtagcggctcggaattcgaggacaggaagccggagaatctggcgtgtcctccgccgccggctgcggtagcccccactcgcccgaacgactacgtgtacttcgacacgtcggactctgtgccgaggctgcacacggactcaagctgctcggagcacgtggtgtcgccggagttcacttgcgaggtgcagagcgagcccaagtggaaggagtgggagaaggccctcgattttaactacaattacatggacaccagtgtagagaacgggttcgggccgcagttccagagcgctaatcagatgtcgccgctgcaggatattttcatgtacctacagaagccgtattgattttgatgaagcggggcctacaattgcattgctatgagtcgccgcatcggacggcaacgggagacccaggtcgatgagagtgcgttttcgatgctgtgacaagggaaagggaagggggatttgcgtcgcggggtccaccatttgggcccaaggctgggtgatttgggagcgttgatataaagatgatatatatagatggaaaaaagatgatggggctggttttggaagatagaaatatgaagaagtttggtttttaatgtgtacagcatgtatgtatagatataaataggtaatgttgttcacatgatgattttgaagggccgtctaaatcgtaatatttgttctttgtgaaaaaaaaaaaaaaaaaaaa

SEQ ID NO: 87 - protein, 295 aa, Prunus mume
MSSSDLQLPPGFRFHPTDEELVKHYLCRKCQSQPISVPIIAEIDLYKYNPWDLPGLALYGEKEWYFFSPRDRKYPNGSRPNRAAGSGYWKATGADKPIGSPKPVGIKKALVFYAGKAPRGEKTNWIMHEYRLADVDRSPRKKSSSLRLDDWVLCRIYNKKGTVEKQQQQQQQQQQQTTSRMSSGSEFEDRKPENLACPPPPAAVAPTRPNDYVYFDTSDSVPRLHTDSSCSEHVVSPEFTCEVQSEPKWKEWEKALDFNYNYMDTSVENGFGPQFQSANQMSPLQDIFMYLQKPY

SEQ ID NO: 88 - DNA, 1211 bp, Brassica napus
atttcattaggattatattactagagacagatcctcgaatagaaaagaaaatgtcagaactacagctgcctccaggattccgatttcacccaaccgacgaagagctggtgatgcactatctctgccgcaaatgcgcctctcagtccatcgccgtccccatcatcgctgagatcgatctctacaaatatgatccttgggagcttcccggtttagccttgtacggtgagaaggaatggtatttcttctctccaagagacagaaaatatccgaatggttctcggccgaaccggtcagctggttcgggttactggaaagctactggagctgataaaccgatcggacttcctaaaccggttgggattaagaaggctctggttttctacgccgggaaagctccaaagggtgagaaaaccaattggatcatgcatgagtaccgtcttgccgacgttgaccgatcatcggctgctcgcaagaagaagaatagtctcaggctggatgattgggttctttgtcggatttacaacaaaaaaggagccatcgagaagcgaggaccaccaccaactccggttgtttacggcgacgaggtcgtggaggagaagccgaggctgtcggagatgggcatgcctcctccgccggtgatgccgaatgatttcgtgtactttgacacgtcggactcggtgccaaagctgcatacgacggagtcgagctgctcggagcaggtggtgtcgccggagttcacgagcgaggttcagagcgagcccaagtggaaggattggtcgggtgagaaaagtagccttgattttgggtttaattacatagatgccaccgcgttcgggggaggaggagggagcaatcagctgtttccgctacaggacatgttcatgtacaacatgcccaagccttattaggtgaaggcaaacgctcgtctatgggtatcacgagatcggttacggttacggtcggtcaatgagtgtgccgccattagatatttattaccatgatgtttgttgttcagtgttacttttattttctaagcggtcagattacgggaaatctctaatcggatggcggtcgatgtgtcattgtactagtgttgtttggtagaagaatccacatgtcttttcttttttgggctttagtggggcataaaagtcaaaagctaaggatatttgttattatctccttcgtaataatcaattaaatatttcttg

SEQ ID NO: 89 - protein, 285 aa, Brassica napus
MSELQLPPGFRFHPTDEELVMHYLCRKCASQSIAVPIIAEIDLYKYDPWELPGLALYGEKEWYFFSPRDRKYPNGSRPNRSAGSGYWKATGADKPIGLPKPVGIKKALVFYAGKAPKGEKTNWIMHEYRLADVDRSSAARKKKNSLRLDDWVLCRIYNKKGAIEKRGPPPTPVVYGDEVVEEKPRLSEMGMPPPPVMPNDFVYFDTSDSVPKLHTTESSCSEQVVSPEFTSEVQSEPKWKDWSGEKSSLDFGFNYIDATAFGGGGGSNQLFPLQDMFMYNMPKPY

SEQ ID NO: 90 - DNA, 1317 bp, Arabidopsis thaliana
atggactttgctctcttctcctcgatttcaatctttgagataaaccacaaagatcctccgattcgaaggtttataaaaactcaaaatcgaatcttatccacaagaaaacaacaaggtacttttccaaaaatgaaggcggagttgaatttgccggcgggattccgatttcatccgacggacgaagagcttgtcaagttctatctttgccggagatgtgcgtcagaaccgattaacgttccggttatcgcagagattgacttgtacaaattcaatccatgggagcttccagaaatggcgttgtacggtgagaaagaatggtacttcttctcgcatagagaccggaaatacccaaacgggtcgagaccaaaccgggcagctggaaccggttattggaaagcgactggagctgataaaccgatcggaaaaccgaagacgttagggattaagaaagcactcgtcttctacgcaggaaaagctccgaaagggattaaaacgaattggattatgcacgagtatcgtctcgctaatgtcgatcgatctgcttctaccaacaagaagaacaacttaagacttgatgattgggttttgtgtcggatatacaataagaaaggaacaatggagaagtatttaccggcggcggctgagaaaccgacggaaaagatgagtacgtcggactcaagatgctcaagtcacgtgatttcaccggacgtcacgtgttctgataactgggaggttgagagtgagcccaaatggattaatctggaagacgcgttagaggcatttaatgatgacacgtccatgtttagttccattggtttgttgcaaaatgacgcctttgttcctcagtttcagtaccagtcctccgatttcgtcgattcgtttcaggacccgttcgagcagaaaccgttcttgaattggaattttgctcctcaagggtaaaaataatcggcaaaaagttgaagcttttcagagtcttcgatcaccggcattgtgtcggatcctgacccggagaccaagtcgggtcatacgattacataatcgggttattgagatttccacatttggatttccgagactaaccaacttaacggattctggggtaattggggggttttgcacaggtgaatcacactgagtcagcaagtttcgattttttggttttgttttgtaatgattgattaaatgtctaaagatatcacgaagtagatacagaagaactgtaaaagcaattgtgaccaaccattatgaatcatatatatattcaatgaagcatgagcttatttcttctttaatgaagcaatgtacatttttctccaa

SEQ ID NO: 91 - protein, 312 aa, Arabidopsis thaliana
MDFALFSSISIFEINHKDPPIRRFIKTQNRILSTRKQQGTFPKMKAELNLPAGFRFHPTDEELVKFYLCRRCASEPINVPVIAEIDLYKFNPWELPEMALYGEKEWYFFSHRDRKYPNGSRPNRAAGTGYWKATGADKPIGKPKTLGIKKALVFYAGKAPKGIKTNWIMHEYRLANVDRSASTNKKNNLRLDDWVLCRIYNKKGTMEKYLPAAAEKPTEKMSTSDSRCSSHVISPDVTCSDNWEVESEPKWINLEDALEAFNDDTSMFSSIGLLQNDAFVPQFQYQSSDFVDSFQDPFEQKPFLNWNFAPQG

SEQ ID NO: 92 - DNA, 1340 bp, Capsicum annuum
gcaggcaaacacacaaagcaacagctgcaaacagcaaaagaaacacaacggagatttattcagacgcctttgatcttcagataagaaacaggcaagttaccaagagtgatatttattgagacgtccttgattttagctgggaaacaggcaagttttacaaagagaatgatcaaaggaatcgttggaaatcagcaattggggttacctgcaggatttcgatttcaccctactgatgaagagttggtgcagcattatttgtgcaggaaatgtgcaggacagagtatttctgtttcgattatagctgaaattgatctttacaagtttgatccttggcagttgcctgaaaaggcattatacggtgaaaaagagtggtattttttctcccaagaggatagaaaatacccgaacggttcaaggccgaaccgggcagcaggaaccggttattggaaagcgaccggagcagataaaccggtgggaaaaccgaaaacattagggataaaaaaggcacttgtattttatgctggaaaagcaccaagaggtataaagactaattggattatgcatgagtatcgacttgctaatgtggacagatctgctggaaagagtaataacttgaggcttgatgattgggtattgtgtcgaatatacaacaagaaggggcacactttgagaagtattacaatgtgggccagcaagagaggtgagagttttggggaatttgaggatgaaataaaaccaaaaatatttccaacacaactagcaccggctccggggcagtggcccccacgaccccaatcaacccccgcaagcgactacttcaactttgaaacatccgagtcgatgactactactaggatgcacacgacaaactcgagctctggctcagagcatgtcttgtcgtcatgtgacaaggaggttcagagtgcacctaaatgggacgaccttggaaccgccgcccttgatttccagataaattatttggatggtttgctgaacgacccttttgaaatccaaatgcagcagcaaaattgcaacattgaccagttcaacactttccaggacatgttcctatacatgcaaaaaccttagtagaattgtataaatcatgtgattcaaattgattttgatccatgacattttgttggttctttggtggtgtaggtcaactttttattgattagattagaaaagtagaaatgctattcaaatttggtgggctatagctcaaatgagccttcgctagatagccaaaggattatgtagaaggcttattgtaaggtacaggtaaaacaaatgaaaatttgttaatatcaatttatcattcttcaaaaaaaaaaaaa

SEQ ID NO: 93 - protein, 307 aa, Capsicum annuum
MIKGIVGNQQLGLPAGFRFHPTDEELVQHYLCRKCAGQSISVSIIAEIDLYKFDPWQLPEKALYGEKEWYFFSQEDRKYPNGSRPNRAAGTGYWKATGADKPVGKPKTLGIKKALVFYAGKAPRGIKTNWIMHEYRLANVDRSAGKSNNLRLDDWVLCRIYNKKGHTLRSITMWASKRGESFGEFEDEIKPKIFPTQLAPAPGQWPPRPQSTPASDYFNFETSESMTTTRMHTTNSSSGSEHVLSSCDKEVQSAPKWDDLGTAALDFQINYLDGLLNDPFEIQMQQQNCNIDQFNTFQDMFLYMQKP

SEQ ID NO: 94 - DNA, 1316 bp, Arabidopsis thaliana
aagtttcaaaaacgccaagtttcagaggtagagagagagatactacaattgattaggataggatcaggatcatcctcaacaacctcctcctaattcctcctccattcatagtaacaataatattaagaaagagggtaaactatgtcagaattattacagttgcctccaggtttccgatttcaccctaccgatgaagagcttgtcatgcactatctctgccgcaaatgtgcctctcagtccatcgccgttccgatcatcgctgagatcgatctctacaaatacgatccatgggagcttcctggtttagccttgtatggtgagaaggaatggtacttcttctctcccagggacagaaaatatcccaacggttcgcgtcctaaccggtccgctggttctggttactggaaagctaccggagctgataaaccgatcggactacctaaaccggtcggaattaagaaagctcttgttttctacgccggcaaagctccaaagggagagaaaaccaattggatcatgcacgagtaccgtctcgccgacgttgaccggtccgttcgcaagaagaagaatagtctcaggctggatgattgggttctctgccggatttacaacaaaaaaggagctaccgagaggcggggaccaccgcctccggttgtttacggcgacgaaatcatggaggagaagccgaaggtgacggagatggttatgcctccgccgccgcaacagacaagtgagttcgcgtatttcgacacgtcggattcggtgccgaagctgcatactacggattcgagttgctcggagcaggtggtgtcgccggagttcacgagcgaggttcagagcgagcccaagtggaaagattggtcggccgtaagtaatgacaataacaatacccttgattttgggtttaattacattgatgccaccgtggataacgcgtttggaggaggagggagtagtaatcagatgtttccgctacaggatatgttcatgtacatgcagaagccttactagaagggaattcctttcctgccgccgaaacgcaacgcaaaacgaccctcgtttttgcgtttatggcaacacgagaccgttttatatggtcaatgagtgtgccgattcggccattagatttctgttcagtcttcgtttattctatagaccgtccgatttcagatcatccctaatcggacggtggtcgttggatgtatcagtagtgtattactgtgttaggtagaagaaaatccacttgttcttaaattggcataaaagtcagaagctaatatttatatgtgccgcaatcaatttaatattttctgtct

SEQ ID NO: 95 - protein, 289 aa, Arabidopsis thaliana
MSELLQLPPGFRFHPTDEELVMHYLCRKCASQSIAVPIIAEIDLYKYDPWELPGLALYGEKEWYFFSPRDRKYPNGSRPNRSAGSGYWKATGADKPIGLPKPVGIKKALVFYAGKAPKGEKTNWIMHEYRLADVDRSVRKKKNSLRLDDWVLCRIYNKKGATERRGPPPPVVYGDEIMEEKPKVTEMVMPPPPQQTSEFAYFDTSDSVPKLHTTDSSCSEQVVSPEFTSEVQSEPKWKDWSAVSNDNNNTLDFGFNYIDATVDNAFGGGGSSNQMFPLQDMFMYMQKPY

SEQ ID NO: 96 - DNA, 1423 bp, Lycopersicon esculentum
ctaaattccttcttgtttatcattttctctcttcccaaaaaaaaaatcccaaaatttaatcataatacaattcgaatttatcaacctcgtactacgtacatatttttgttggtacgtaaaatactgaattcaggtcaactcaaacatcgtaaattgtgatttctttatggaaagtacggattcatcaaccgggacacgtcatcagcctcaactcccaccggggtttcgattccacccgacggacgaagaactcatcgtccactacctcaaaaaacgagtcgccggcgctccgattccggtggatattattggtgaaattgatctttataagtttgatccatgggaactccctgctaaggcaatattcggagagcaagaatggttcttttttagtccaagagatagaaaatatcctaacggggcgaggccaaatcgggctgcaacatcgggttattggaaggctaccggaaccgacaagccggtttttacttccggtggaacacaaaaggttggggtaaaaaaggcgctcgttttttacggcggtaaaccaccaaaaggggtaaaaactaattggatcatgcatgaatacagagttgtagaaaataaaacaaataacaagccacttggttgtgataatattgttgccaacaaaaaaggatctttgaggctagatgattgggttttatgtcgaatttacaagaagaataacacacaaaggtccatagatgatttgcatgatatgttgggatcgataccacaaaatgtaccaaattcaatattacaaggaataaagccttcaaactatggtacaatattgctcgaaaatgaatcgaatatgtacgatggaattatgaataacacgaacgatattatcaacaataataatagatccattccacaaatatcgtcaaagagaacgatgcatggaggtttgtattggaataacgacgaagcaacaacaacaacaacaactattgataggaaccattctccaaatacaaaaaggttccttgttgagaacaacgaggacgatggacttaacatgaataatatttcgcgaattacaaatcatgaacaaagtagctccattgccaatttcctgagccagtttcctcaaaatccttcgattcaacaacaacaacaacaacaagaagaagtattgggatctcttaatgatggggtcgtctttcgacaaccttataatcaagttactggcatgaattggtactcttaaagatataaaaaggcaaaaaatagttagccctgtaaaatcaatcgatcaatcaatcatagatatattatatatggatttcgttatattttacttttagttagaattaatatatagaatatcttctatctcacattaacaaataagaacatttataacaaaaaaaaaaaaaaaaaaaaaaaaaaaaaaaaa

SEQ ID NO: 97 - protein, 355 aa, Lycopersicon esculentum
MESTDSSTGTRHQPQLPPGFRFHPTDEELIVHYLKKRVAGAPIPVDIIGEIDLYKFDPWELPAKAIFGEQEWFFFSPRDRKYPNGARPNRAATSGYWKATGTDKPVFTSGGTQKVGVKKALVFYGGKPPKGVKTNWIMHEYRVVENKTNNKPLGCDNIVANKKGSLRLDDWVLCRIYKKNNTQRSIDDLHDMLGSIPQNVPNSILQGIKPSNYGTILLENESNMYDGIMNNTNDIINNNNRSIPQISSKRTMHGGLYWNNDEATTTTTTIDRNHSPNTKRFLVENNEDDGLNMNNISRITNHEQSSSIANFLSQFPQNPSIQQQQQQQEEVLGSLNDGVVFRQPYNQVTGMNWYS

SEQ ID NO: 98 - DNA, 1691 bp, Arabidopsis thaliana
aaaagatcgacgaacataaaaacaaaaacatataatttgggtttttagagttcgaaacttgaaatctttttttttttggttgctgaggaatcgaagtagaagagtataaatgggtgttagagagaaagatccgttagcccagttgagtttgccaccaggttttagattttatccgacagatgaagagcttcttgttcagtatctatgtcggaaagttgcaggctatcatttctctctccaggtcatcggagacatcgatctctacaagttcgatccttgggatttgccaagtaaggctttgtttggagagaaggaatggtatttctttagcccaagagatcggaaatatccgaacgggtcaagacccaatagagtagccgggtcgggttattggaaagcaacgggtactgacaaaattatcacggcggatggtcgtcgtgtcgggattaaaaaagctctggtcttttacgccggaaaagctcccaaaggcactaaaaccaactggattatgcacgagtatcgcttaatagaacattctcgtagccatggaagctccaagttggatgattgggtgttgtgtcgaatttacaagaaaacatctggatctcagagacaagctgttactcctgttcaagcttgtcgtgaagagcatagcacgaatgggtcgtcatcgtcttcttcatcacagcttgacgacgttcttgattcgttcccggagataaaagaccagtcttttaatcttcctcggatgaattcgctcaggacgattcttaacgggaactttgattgggctagcttggcaggtcttaatccaattccagagctagctccgaccaatggattaccgagttacggtggttacgatgcgtttcgagcggcggaaggtgaggcggagagtgggcatgtgaatcggcagcagaactcgagcgggttgactcagagtttcgggtacagctcgagtgggtttggtgtttcgggtcaaacattcgagtttaggcaatgagagagatgtgaagttactgatgggtgaaaaaagtaaaaaaaaaacttggagatagtagagtggcaattgatgtaaataatagggatttatatggggcttttaccgattcggtgaggcttaggattccacaaaggaaaaaggctcgactggggactagtttgatccaacttgacggcccacaaatgtgtaatgtttctcaacggagagaaaaataaatggttaccaatatttttacaccggttatgtgttgataccatttgcacaaaacggtttaagttctgaattgaataacttaacacccaaaatttggtaaaaagcttaatacaaaaagttcaaaggcattttcgcttactgcgacactcggagttgcagagtactctacgtaacagactctgttcatagagtttgcggcaccggtggtgggacattcttgcggacacagtatgtacttttggaagcatcgttcctaagggttgctgcagtaaactccttgtgacttggctcgcaagaaacataacatggccgcaagaaaaaacagcattaacgaagaggtgtttgagatcttcatgtctagtttattcttcctgttttattatgtgtcgactggtgtcaaaagaaacgtgttgattgtgaatttgtagacgccactctgtaaatttatttaaaataaactattttacttcacgtt

SEQ ID NO: 99 - protein, 297 aa, Arabidopsis thaliana
MGVREKDPLAQLSLPPGFRFYPTDEELLVQYLCRKVAGYHFSLQVIGDIDLYKFDPWDLPSKALFGEKEWYFFSPRDRKYPNGSRPNRVAGSGYWKATGTDKIITADGRRVGIKKALVFYAGKAPKGTKTNWIMHEYRLIEHSRSHGSSKLDDWVLCRIYKKTSGSQRQAVTPVQACREEHSTNGSSSSSSSQLDDVLDSFPEIKDQSFNLPRMNSLRTILNGNFDWASLAGLNPIPELAPTNGLPSYGGYDAFRAAEGEAESGHVNRQQNSSGLTQSFGYSSSGFGVSGQTFEFRQ

SEQ ID NO: 100 - DNA, 1335 bp, Triticum aestivum
attgattccgttcccacctgctcaccgtcgccatgccaatgggcagcagcagcgccgccatgcccgccctccctcccggcttccggttccaccccaccgacgaggagctcatcgtccactacctcggcaggcaggccgcgtccatgcccagccccgtgcccatcatcgccgaggtcaacatctacaagtgcaacccatgggacctccccggcaaggccttgttcggggagaatgagtggtacttcttcagcccccgggatcgcaagtaccccaacggcgcgcgccccaaccgcgccgccgggtccggctactggaaggccaccggcaccgacaaggccatcctgtccacgccggccaacgagagcatcggcgtcaagaaggcgctcgtcttctaccggggcaagccgcccaagggcgtcaagaccgactggatcatgcacgagtaccgcctcaccgccgccgacaaccggaccaccaagcgcagaggatcctccatgaggctggatgactgggtgctgtgtaggatccacaagaagtgcaacaacttgcacaacttctcctcctctgaccaggaacaggagcacgagcaggagagctccaccaccgtggaggactcgcacaacaaccacaccgtgtcgtcgcccaagtcggaggccttcgacggcgacggcgacgaccagctgcagctgcagcagttccgccccatggcgatcgccaagtcgtgctccctcaccgacctgctcaacaccgtcgactacgccgcgctctcgcacctcctcctcgacggcgccggcgccggcgcctcgtcgtcggacgccggagcagactaccagctgccgccggaaaacccgctcatctactcgcagcctccatggcaacaaacgctacactataataacaataacaatggctacgtgaacatcgacaccatcgacgtgcctcagatacccgaggcccgtgtagatgactacggcatgaatggcgataggtacaacggcatgaagaggaagaggtccagcggcagtttgtactgcagccagctgcagctcccggcggatcagtacagcggcatgctgatccatccgttcctcagccagcagctgcacatgtgaagaaccagagagcttggatcgaagagatcatcattgttccatttgaacttgctgtagatcgaggggatcccccgctgtggcagataggcagggatctagcttgcttgctgtgtcgtgaccgaccgaccgataagaacggacaaatttcagaattcttggtgtagcacaaaagctgtaaattacgggggtttattgtgaaataaataaatccagtattattaag

SEQ ID NO: 101 - protein, 359 aa, Triticum aestivum
MPMGSSSAAMPALPPGFRFHPTDEELIVHYLGRQAASMPSPVPIIAEVNIYKCNPWDLPGKALFGENEWYFFSPRDRKYPNGARPNRAAGSGYWKATGTDKAILSTPANESIGVKKALVFYRGKPPKGVKTDWIMHEYRLTAADNRTTKRRGSSMRLDDWVLCRIHKKCNNLHNFSSSDQEQEHEQESSTTVEDSHNNHTVSSPKSEAFDGDGDDQLQLQQFRPMAIAKSCSLTDLLNTVDYAALSHLLLDGAGAGASSSDAGADYQLPPENPLIYSQPPWQQTLHYNNNNNGYVNIDTIDVPQIPEARVDDYGMNGDRYNGMKRKRSSGSLYCSQLQLPADQYSGMLIHPFLSQQLHM

SEQ ID NO: 102 - DNA, 1423 bp, Triticum aestivum
gcagcatttttatgcagtagccatcttctcctcctcctccccccgccttccagctagccacctagctcactatcacatcatccagcagcccacaccaactcatattgattccgttcccacctgctcgccatcgccagccatgccaatgggcagcagcgccgccatgcccgccctccctcccggcttccggttccaccccaccgacgaggagctcatcgtccactacctccgcaggcaggccgcgtccatgcccagccccgtgcccatcatcgccgaggtcaacatctacaagtgcaacccatgggacctccccggcaaagctttgttcggggagaatgagtggtacttcttcagcccccgggatcgcaagtaccccaacggcgcgcgcccgaaccgcgccgccgggtccggctactggaaggccaccggcaccgacaaggccatcctgtccacgccggccaacgagagcatcggggtcaagaaggcgctcgtgttctacaggggcaagccgcccaagggcgtcaagaccgactggatcatgcacgagtaccgcctcaccgcagccgacaaccggaccaccaagcgcagaggatcctccatgaggctggatgactgggtgctgtgtaggatccacaagaagtgcggcaacttgcccaacttctcctcctctgaccaggaacaggagcatgagcaggagagctccaccgtggaggactcgcagaacaaccacaccgtgtcgtcgcccaagtccgaggccttcgacggcgacggcgacgaccacctccagttgcagcagttccgccccatggcgatcgccaagtcgtgctccctcaccgacctgctcaacaccgtcgactacgccgcgctctcgcacctcctcctcgacggcgccggcgcctcgtcgtcggacgccggagcagactaccagctgcctcccgaaaacccactcatctactcgcagcctccatggcaacaaacgctacactataataacaacaacggctacgtgaacaacgagaccatcgacgtgcctcagctacccgaggcgcgcgtagatgactacggcatgaatggcgataagtataacggcatgaagaggaagagatccagcggcagcttgtactgcagccagctgcagctcccagcggatcagtacagcggcatgctgatccatccgttcctcagccagcagctgcacatgtgaagaaccagagagcttgggtcgaagagatcatcattgttccatttgaacttgctgtagatcgagaggatcccccgctgtggcagataggcagggatctagctagcttgctgtgtcgtgaacgaccgaccgataagaacggacaaatttcagaattcttggtgtagcacaaagctgtaaattacgggggtttattgtgaaataaattaatccagtattatc

SEQ ID NO: 103 - protein, 354 aa, Triticum aestivum
MPMGSSAAMPALPPGFRFHPTDEELIVHYLRRQAASMPSPVPIIAEVNIYKCNPWDLPGKALFGENEWYFFSPRDRKYPNGARPNRAAGSGYWKATGTDKAILSTPANESIGVKKALVFYRGKPPKGVKTDWIMHEYRLTAADNRTTKRRGSSMRLDDWVLCRIHKKCGNLPNFSSSDQEQEHEQESSTVEDSQNNHTVSSPKSEAFDGDGDDHLQLQQFRPMAIAKSCSLTDLLNTVDYAALSHLLLDGAGASSSDAGADYQLPPENPLIYSQPPWQQTLHYNNNNGYVNNETIDVPQLPEARVDDYGMNGDKYNGMKRKRSSGSLYCSQLQLPADQYSGMLIHPFLSQQLHM

SEQ ID NO: 104 - DNA, 891 bp, Saccharum officinarum
atgagcggcggcggtcaggatctgcagctgccgccggggttccggttccacccgacggacgaggagctggtgatgcactacctctgccgccgctgcgccagcctgcccatcgccgtccccatcatcgccgagatcgacctctacaagttcgatccatggcagctccccaggatggcgctgtacggcgagaaggagtggtacttcttctccccgcgggaccgcaagtacccgaacgggtccaggcccaaccgcgccgccgggtccggctactggaaggccaccggcgccgacaagcccgtgggcacgcccaagccgctcgccatcaagaaggcgctcgtcttctacgccggcaaggcgcccaagggcgagaagaccaactggatcatgcacgagtaccgcctcgccgacgtcgaccgctccgcccgcaagaagaacagcctcaggttggatgactgggtcctgtgccgcatctacaacaagaagggagggctggagaagccggcggcggcgtcctccggcgaccacaagccgatggtgttcgccgcgggcgcggtgagctccccgccggagcagaagccgttcgtggcgacgccgggcgggctgccccccgccgcgttcacggcggacctggcggcgtactacgaccggccgtcggactcgatgccgcggctgcacgcggactccagctgctcggagcaggtgctgtcgccggagcagctggcgtgcgaccgggaggtgcagagccagcccaagatcagcgagtgggagcgcaccttcgcctccgaccccgtcaaccccgctggctccatgctcgtcgaccccgtcgtcggtggccacgccggcgacccgctgctgcaggacatcctcatgtactggggcaagccgttctag

SEQ ID NO: 105 - protein, 296 aa, Saccharum officinarum
MSGGGQDLQLPPGFRFHPTDEELVMHYLCRRCASLPIAVPIIAEIDLYKFDPWQLPRMALYGEKEWYFFSPRDRKYPNGSRPNRAAGSGYWKATGADKPVGTPKPLAIKKALVFYAGKAPKGEKTNWIMHEYRLADVDRSARKKNSLRLDDWVLCRIYNKKGGLEKPAAASSGDHKPMVFAAGAVSSPPEQKPFVATPGGLPPAAFTADLAAYYDRPSDSMPRLHADSSCSEQVLSPEQLACDREVQSQPKISEWERTFASDPVNPAGSMLVDPVVGGHAGDPLLQDILMYWGKPF

SEQ ID NO: 106 - DNA, 1817 bp, Oryza sativa
aactagcttagctagacagcgtgtgttggtggtggtggtggtgtgtgtgtgtgtgaggagggtgatcgatcgatcgagcgatggagagcccggactcgtcgtccggctcggcgccaccgcgagtactacggcggcaacagcagcagccgggctcggcgccggagctgccgccggggttccggttccacccgacggacgaggagctggtggtgcactacctcaagaagaaggccgcctccgttccgctccccgtcaccatcatcgccgaggtcgatctctacaagttcgatccctgggatctccccgagaaggcgaacttcggggagcaggagtggtatttcttcagcccgagggaccacaagtacccgaacggggcgcggccgaaccgggcggcgacgtcggggtactggaaggccaccggcaccgacaagcccatcatgtcgtcggggagcacccgcgagaaggtcggcgtgaagaaggcgctcgtgttctaccggggcaagccacccaagggcgtcaagactaactggatcatgcacgagtaccgtctcacggacacgtctagctccgccgccgccgtcgctacgaccaggcggccgccgccgcccatcaccggcggtagcaagggcgccgtctctctcaggctggatgactgggtgctgtgccgcatatacaagaagacgaacaaggccggtgcggggcagaggagcatggagtgcgaggactccgtggaggacgcggtggccgcgtacgcgccgtcgtcgcagcagcatgccacggctgctgctggcatggccggttcggacggcgccggaggagttgctgcagcgcacggcggcgactacagttcactgctccatcacgacagccacgaggacaccttcctcgtaaacggcctgctcaccgcggaggacgccgccggcctctcgaccggcgccagctctctcagccagctcgccgcggcggcgagggcggcggcgacaccgtgcgacgccaccaagcagcttcttgctccgtctccaaccccattcaactggttcgaggcattccttccacgggccaaggagtttcctagtgggctaagcaggagtagcagagacatcggcgacatgtcgctgtcatcgacggtggacaggagcctgtctgaggctggcgccgtggccattgacaccggcgacgccgccaatggcgcaaacactatgcctgcatttatcaatcctctcggcgtgcagggtgcaacctaccaacaacaccaagccatcatgggtgcctcgttgccatcggagtcagcagcagcagcagccgcctgcaatttccagcatccgttccaactctccagggtgaattgggattcctgaataaaaggtgccggcattatgcatacacatatatgcacatgcatacatgcatggcttttcaagtagtagcacaacattactagtaattaatcacactaatgtgtgtggcagtcgcattcagtgagcactgatcgagtagttgcatgaacacaacactaatgcatgcactacatatatatggccgcattgctcctagggcacgtacctgtacgaactaggtaagtgacctaaccagctagatcatgttcagaataaggagaagaagccgcatgcaaacacgtagatcatatggctttgccttcacatgcgtttgcatcatatatatcgcattcagaaagtagtgctgcagctaacacatagatatggtgttagcttcatgcgtttgtaccatatatagcggatgcagaaagtagctagttgcactgttcatcattatcccatgagatatgaactttatat

SEQ ID NO: 107 - protein, 425 aa, Oryza sativa
MESPDSSSGSAPPRVLRRQQQQPGSAPELPPGFRFHPTDEELVVHYLKKKAASVPLPVTIIAEVDLYKFDPWDLPEKANFGEQEWYFFSPRDHKYPNGARPNRAATSGYWKATGTDKPIMSSGSTREKVGVKKALVFYRGKPPKGVKTNWIMHEYRLTDTSSSAAAVATTRRPPPPITGGSKGAVSLRLDDWVLCRIYKKTNKAGAGQRSMECEDSVEDAVAAYAPSSQQHATAAAGMAGSDGAGGVAAAHGGDYSSLLHHDSHEDTFLVNGLLTAEDAAGLSTGASSLSQLAAAARAAATPCDATKQLLAPSPTPFNWFEAFLPRAKEFPSGLSRSSRDIGDMSLSSTVDRSLSEAGAVAIDTGDAANGANTMPAFINPLGVQGATYQQHQAIMGASLPSESAAAAAACNFQHPFQLSRVNWDS

SEQ ID NO: 108 - DNA, 1218 bp, Medicago truncatula
atgggaaccccacagaccaatttgccaccaggttttaggttccaccctactgatgcagaactcattcttcactaccttaggaaaaaaattgcctccattcccttgcctgtttccatcattgctgaagttgatatttataagttggatccttgggatttaccagctaaggcttcatttggtgagaaagaatggtacttttttagtcctagagatagaaagtacccaaacggtgcaaggccaaacagggcagctgcttcagggtattggaaagccactggcactgataagaccatagtggcatcattgccatgtggaggaggaagatcacaagagaacattattggtgtcaaaaaggctcttgttttttacaaaggaaaacccccaaagggtattaagactaattggatcatgcatgaatatcgtcttgttgacaacaataaacctattaagctcaaagattcttccatgaggttggatgattgggtgctatgccgaatttacaagaaatcaaaatgtgcactaacttcaacagaatcatcagaaactatggtaggtgaagtggaacatgcagaagagacacaattccaagaaaccctatttccaatcaccaaaaacacaacctcacctcttcaaaacacactcatgtctcaaaaatcagtgtccttttcaaacctattagatgctatggactactccatgttaagcagcttcttatctgaaaattccaacaacccatcaggaattggaacaagttcaggtttcaacactgaaaattttaaccaacaacaatcttcccatatcaacacttgcaacaattacatgtctcagaagaatcctcaatccaacactttaaagcaccagctttcaaacgtagatgaagacatgttatacccatcaaagaagtacttgagttcctcttgcaattttcctaacatcaattctcagtatgaaaactaccttatgaagcaatctttgatgaatcaacaattgcttttaggtcctcatcatcaatatcaaggctaatccaaaataccacaaaaattaagtggtaccaaaaaaaaaaagattatgaaatagaaaagttaagtaagatttctagaagttgggcccaccaaattacaccaatgtcatcattaagtaaggattgctaatttaatagtagtgcacaaaatatagtgtgttctattttgtccattttaattttttttctaggaattg

SEQ ID NO: 109 - protein, 340 aa, Medicago truncatula
MGTPQTNLPPGFRFHPTDAELILHYLRKKIASIPLPVSIIAEVDIYKLDPWDLPAKASFGEKEWYFFSPRDRKYPNGARPNRAAASGYWKATGTDKTIVASLPCGGGRSQENIIGVKKALVFYKGKPPKGIKTNWIMHEYRLVDNNKPIKLKDSSMRLDDWVLCRIYKKSKCALTSTESSETMVGEVEHAEETQFQETLFPITKNTTSPLQNTLMSQKSVSFSNLLDAMDYSMLSSFLSENSNNPSGIGTSSGFNTENFNQQQSSHINTCNNYMSQKNPQSNTLKHQLSNVDEDMLYPSKKYLSSSCNFPNINSQYENYLMKQSLMNQQLLLGPHHQYQG

SEQ ID NO: 110 - DNA, 1264 bp, Oryza sativa
tcgacgctactcaagtggtgggaggccaccgcatgttccaacgaagcgccaaagaaagccttgcagactctaatgctattagtcgcctaggatatttggaatgaaaggaaccgcagagtttttcagcaccaagagcttccggtggctagtctgatagccaaaattaaggaggatgccaaaacatgggtcttggcgggcgcgaaacaccttgataggtggcttaccttttaacatgttcgggccaaaggccttgagacggtaaagttttctatttgcgcttgcgcatgtacaattttattcctctattcaatgaaattggtggctcactggttcattaaaaaaaaaagaatctagcctgttcgggaagaagaggattttgttcgtgagagagagagagagagagagagagagagagagagagaaggaggaggaggattttcaggcttcgcattgcccaacctctgcttctgttggcccaagaagaatcccaggcgcccatgggctggcagtttaccacggacctacctagcctaccttagctatctaagcgggccgacctagtagccacgtgcctagtgtagattaaagttgccgggccagcaggaagccacgctgcaatggcatcttcccctgtccttcgcgtacgtgaaaacaaacccaggtaagcttagaatcttcttgcccgttggactgggacacccaccaatcccaccatgccccgatattcctccggtctcggttcatgtgatgtcctctcttgtgtgatcacggagcaagcattcttaaacggcaaaagaaaatcaccaacttgctcacgcagtcacgctgcaccgcgcgaagcgacgcccgataggccaagatcgcgagataaaataacaaccaatgatcataaggaaacaagcccgcgatgtgtcgtgtgcagcaatcttggtcatttgcgggatcgagtgcttcacagctaaccaaatattcggccgatgatttaacacattatcagcgtagatgtacgtacgatttgttaattaatctacgagccttgctagggcaggtgttctgccagccaatccagatcgccctcgtatgcacgctcacatgatggcagggcagggttcacatgagctctaacggtcgattaattaatcccggggctcgactataaatacctccctaatcccatgatcaaaaccatctcaagcagcctaatcatctccagctgatcaagagctcttaattagctagctagtgattagctgcgcttgtgatc

SEQ ID NO: 111 - protein, 6 aa, Artificial sequence
  NAC transcription factor motif IV
  VARIANT (1)..(1): Xaa is Pro, Ser, Asn or Ala
  VARIANT (2)..(2): Xaa is Leu, Ile, Ala or Val
  VARIANT (3)..(3): Xaa is Ser, Asp, Val, Gln or Pro
  VARIANT (4)..(4): Xaa is Ile or Val
  VARIANT (6)..(6): Xaa is Thr, Gly or Ala
XXXXIX

SEQ ID NO: 112 - protein, 6 aa, Artificial sequence
  NAC transcription factor motif V
  VARIANT (2)..(2): Xaa is Ser or Gly
  VARIANT (3)..(3): Xaa is Gln, Ala, Val or Ser
  VARIANT (6)..(6): Xaa is Ser or Asn
NXXRPX

SEQ ID NO: 113 - protein, 7 aa, Artificial sequence
  NAC transcription factor motif VI
  VARIANT (1)..(1): Xaa is Tyr or Cys
  VARIANT (2)..(2): Xaa is Lys or Arg
  VARIANT (3)..(3): Xaa is Ile or Leu
  VARIANT (4)..(4): Xaa is His, Phe or Tyr
  VARIANT (5)..(5): Xaa is Lys or Asn
  VARIANT (7)..(7): Xaa is Asn, Cys, Ser, Thr or Lys
XXXXXKX

SEQ ID NO: 114 - protein, 7 aa, Artificial sequence
  NAC transcription factor motif VII
  VARIANT (2)..(2): Xaa is Gln, Thr or Glu
  VARIANT (6)..(6): Xaa is Val or Met
  VARIANT (7)..(7): Xaa is Arg, Lys or Gln
NXWEKXX

SEQ ID NO: 115 - protein, 10 aa, Artificial sequence
  NAC transcription factor motif VIII
  VARIANT (4)..(4): Xaa is Ala or Thr
  VARIANT (10)..(10): Xaa is Asp or Glu
WGEXRTPESX

SEQ ID NO: 116 - protein, 10 aa, Artificial sequence
  NAC transcription factor motif IX
  VARIANT (1)..(1): Xaa is Leu or Val
  VARIANT (4)..(4): Xaa is Glu or Lys
  VARIANT (6)..(6): Xaa is Arg, Ala, Val or Ser
  VARIANT (7)..(7): Xaa is Val, Ala, Gln, Arg or Met
  VARIANT (8)..(8): Xaa is Glu or Asp
  VARIANT (9)..(9): Xaa is Glu, Leu or Asp
  VARIANT (10)..(10): Xaa is Gly, Asp or Ala
XPKXEXXXXX

SEQ ID NO: 117 - protein, 10 aa, Artificial sequence
  NAC transcription factor motif X
  VARIANT (2)..(2): Xaa is Tyr or Leu
  VARIANT (5)..(5): Xaa is Ile or Leu
  VARIANT (7)..(7): Xaa is Ser or Gly
  VARIANT (8)..(8): Xaa is Met, Pro or Leu
  VARIANT (9)..(9): Xaa is Tyr or Gly
  VARIANT (10)..(10): Xaa is Asn or Ser
SXDDXQXXXX

SEQ ID NO: 118 - protein, 14 aa, Artificial sequence
  NAC transcription factor motif XI
  VARIANT (3)..(3): Xaa is Val, Ile or Met
  VARIANT (5)..(5): Xaa is Lys or Arg
  VARIANT (6)..(6): Xaa is Ile, Ala or Leu
  VARIANT (8)..(8): Xaa is Ala, Ser or Thr
  VARIANT (9)..(9): Xaa is Glu or Asp
  VARIANT (12)..(12): Xaa is Gly or Cys
DSXPXXHXXSSXSE

SEQ ID NO: 119 - DNA, 20 bp, Artificial sequence
  primer
ccaacactagtaggataaag

SEQ ID NO: 120 - DNA, 20 bp, Artificial sequence
  primer
accactgggctaattaatta

SEQ ID NO: 121 - DNA, 20 bp, Artificial sequence
  primer
ggtcgacccacgcgtccgct

SEQ ID NO: 122 - DNA, 20 bp, Artificial sequence
  primer
aactgaagtacccgttctta

SEQ ID NO: 123 - DNA, 20 bp, Artificial sequence
  primer
atcctccacaagagaaacta

SEQ ID NO: 124 - DNA, 20 bp, Artificial sequence
  primer
agtacagtgtagcacaataa

SEQ ID NO: 125 - DNA, 52 bp, Artificial sequence
  primer
ggggacaagtttgtacaaaaaagcaggcttaaacaatggggatggggatgag

SEQ ID NO: 126 - DNA, 47 bp, Artificial sequence
  primer
ggggaccactttgtacaagaaagctgggttcgatcaccacctgttcg

SEQ ID NO: 127 - DNA, 51 bp, Artificial sequence
  primer
ggggacaagtttgtacaaaaaagcaggcttaaacaatggagtgcggtggtg

SEQ ID NO: 128 - DNA, 50 bp, Artificial sequence
  primer
ggggaccactttgtacaagaaagctgggtgtcacgttccgttaattagaa

SEQ ID NO: 129 - DNA, 48 bp, Artificial sequence
  primer
ggggacaagtttgtacaaaaaagcaggcttaaacaatgccgagcagcg

SEQ ID NO: 130 - DNA, 48 bp, Artificial sequence
  primer
ggggaccactttgtacaagaaagctgggtctactgcatctgcagatga

SEQ ID NO: 131 - DNA, 1100 bp, Oryza sativa
catgtgcggcggcgccatcctctccgacctcatcccgccgccgcggcgggtcaccgccggcgacctctggctggagaagaccaagaagcagcagcagcagaagaagaagaacaagggcgcgaggaggctgccactgcgccaagaggaggaggatgatttcgaggccgacttcgaggagttcgaggtggattccggcgagtgggaggtggagtccgacgccgacgaggccaagccgctcgccgcgccccggagcggcttcgctaaaggtggattgaaaaacactactgttgctggtgctgatgggcctgcagcaaggtctgctaaaaggaagagaaagaaccaattcaggggtatccgccagcggccatggggcaaatgggctgcggaaatcagagatcctcgcaaaggtgtccgcgtctggcttggcaccttcaactctcctgaggaagctgccagagcttatgatgctgaagcacgaaggattcgaggcaagaaggccaaggtcaatttcccagatggggctccagtggcttctcagaggagtcatgctgagccctcctccatgaacatgcctgctttcagcatcgaagagaagccggccgtcatgtcagcaggcaacaaaaccatgtacaacacaaatgcttatgcctaccctgctgttgagtacaccttacaggagccatttgtgcagattcagaatgtctcatttgttcctgcaatgaacgcgattgaggatactttcgtgaacctgtcctctgatcaagggagcaactcctttggttgctcggactttagccaggagaatgatatcaagacccctgacataacttccatgcttgcaccgaccatgacaggtgttgatgactccgcattcctccagaacaatgccagtgatgcaatggtacctcctgtgatggggaatgctagcattgatcttgctgacctggagccgtacatgaaatttctgatcgatggtggttcggatgagtcgattgacacccttctgagctctgatggatctcaggatgtggccagtagcatggacctttggagcttcgatgacatgcccgtgtcggccgagttctactgaggggtttggg

SEQ ID NO: 132 - protein, 362 aa, Oryza sativa
MCGGAILSDLIPPPRRVTAGDLWLEKTKKQQQQKKKNKGARRLPLRQEEEDDFEADFEEFEVDSGEWEVESDADEAKPLAAPRSGFAKGGLKNTTVAGADGPAARSAKRKRKNQFRGIRQRPWGKWAAEIRDPRKGVRVWLGTFNSPEEAARAYDAEARRIRGKKAKVNFPDGAPVASQRSHAEPSSMNMPAFSIEEKPAVMSAGNKTMYNTNAYAYPAVEYTLQEPFVQIQNVSFVPAMNAIEDTFVNLSSDQGSNSFGCSDFSQENDIKTPDITSMLAPTMTGVDDSAFLQNNASDAMVPPVMGNASIDLADLEPYMKFLIDGGSDESIDTLLSSDGSQDVASSMDLWSFDDMPVSAEFY

SEQ ID NO: 133 - protein, 13 aa, Artificial sequence
  AP2-2 polypeptide motif XII
  VARIANT (1)..(1): Xaa is Ile, Val, Leu, Lys or Arg
  VARIANT (2)..(2): Xaa is Lys, Gln, Asp, Glu, Ala or Arg
  VARIANT (3)..(3): Xaa is Leu or Ile
  VARIANT (4)..(4): Xaa is Tyr, His or Arg
  VARIANT (6)..(6): Xaa is Ser, Arg, Lys, Thr, Asp, Gly, His, Leu, Asn or Ala
  VARIANT (7)..(7): Xaa is Thr, Arg, Asn, Gly or Lys
  VARIANT (9)..(9): Xaa is Arg, Glu or Lys
  VARIANT (10)..(10): Xaa is Leu, Pro, Thr or Val
  VARIANT (13)..(13): Xaa is Val or Pro
XXXXGXXAXXNFX

SEQ ID NO: 134 - protein, 9 aa, Artificial sequence
  AP2-2 polypeptide motif XIII
  VARIANT (5)..(5): Xaa is Ser or Ala
  VARIANT (6)..(6): Xaa is Val, Leu or Ile
  VARIANT (7)..(7): Xaa ia Leu or Ile
  VARIANT (8)..(8): Xaa is His, Ala, Tyr, Gly, Pro, Glu or Ser
  VARIANT (9)..(9): Xaa is Gly, His, Tyr, Glu, Gln, Asn or Asp
MCGGXXXXX

SEQ ID NO: 135 - protein, 15 aa, Artificial sequence
  AP2-2 polypeptide motif XIV
  VARIANT (1)..(1): Xaa is Asn, Arg, Ser, His, Met, Gln, Pro, Ala, Glu or Lys
  VARIANT (2)..(2): Xaa is Lys, His, Ala, Gly, Glu, Val, Pro, Met or Arg
  VARIANT (3)..(3): Xaa is Lys, Ala, Arg, Ser, Gln, Thr, Val, Gly, His, Pro or Glu
  VARIANT (4)..(4): Xaa is Lys, Gln, Ser, Gly or Arg
  VARIANT (5)..(5): Xaa is Gly, Pro, Ser, Arg, Thr, Ala, Asn or Lys
  VARIANT (6)..(6): Xaa is Asn, Arg, Ser, Ala, Tyr, His, Gly or Thr
  VARIANT (7)..(7): Xaa is Gln, His, Val, Arg, Lys, Ala, Pro, Gly or Leu
  VARIANT (8)..(8): Xaa is Phe or Tyr
  VARIANT (9)..(9): Xaa is Trp, Lys, Leu, Met or Arg
  VARIANT (11)..(11): Xaa is Val or Ile
  VARIANT (12)..(12): Xaa is Gln, His or Arg
  VARIANT (13)..(13): Xaa is Gln, Trp, Lys or Arg
  VARIANT (15)..(15): Xaa is Lys, Thr or Pro
XXXXXXXXXGXXXRX

SEQ ID NO: 136 - protein, 17 aa, Artificial sequence
  AP2-2 polypeptide motif XV
  VARIANT (3)..(3): Xaa is Thr, Glu, Val or Gln
  VARIANT (4)..(4): Xaa is Ser or Gly
  VARIANT (9)..(9): Xaa is Asp, Glu, Ser, Asn or Gly
  VARIANT (10)..(10): Xaa is Ser or Cys
  VARIANT (12)..(12): Xaa is Glu or Asp
  VARIANT (13)..(13): Xaa is Tyr, Leu or Phe
  VARIANT (14)..(14): Xaa is Ser or Gly
  VARIANT (15)..(15): Xaa is Gln, Leu or Trp
  VARIANT (16)..(16): Xaa is Gly, Ser or Glu
  VARIANT (17)..(17): Xaa is Glu, Asp or Asn
SDXXSNSFXXSXXXXXX

SEQ ID NO: 137 - protein, 7 aa, Artificial sequence
  AP2-2 polypeptide motif XVI
  VARIANT (1)..(1): Xaa is Ile, Phe, Met or Leu
  VARIANT (3)..(3): Xaa is Thr, Asn, Met or Ser
  VARIANT (4)..(4): Xaa is Tyr, Leu, Ile or Phe
  VARIANT (5)..(5): Xaa is Glu, Gln, Gly or Asp
  VARIANT (6)..(6): Xaa is Asp, His, Glu or Asn
  VARIANT (7)..(7): Xaa is Tyr, Phe, Ser, Met, Leu, Val, Asp, His, Asn, Glu, Gly or Ile
XWXXXXX

SEQ ID NO: 138 - protein, 12 aa, Artificial sequence
  AP2-2 polypeptide motif XVII
  VARIANT (1)..(1): Xaa is Glu, Ser or Asp
  VARIANT (2)..(2): Xaa is Ala, Trp, Asp or Phe
  VARIANT (3)..(3): Xaa is Ala or Glu
  VARIANT (4)..(4): Xaa is Asp, Leu or Ala
  VARIANT (5)..(5): Xaa is Ala, Gly, Glu or Asp
  VARIANT (6)..(6): Xaa is Gly, Leu or Phe
  VARIANT (7)..(7): Xaa is Glu, Arg, Gly, Gln, Trp or Asn
  VARIANT (8)..(8): Xaa is Gly, Val, Asp, Arg or Glu
  VARIANT (10)..(10): Xaa is Lys, Val, Tyr, Gly, Asp, Leu, Ile or Glu
  VARIANT (11)..(11): Xaa is Arg, Asp, Ser, Asn, Ala, Glu or Val
  VARIANT (12)..(12): Xaa is Gly, Thr, Glu, Arg, Ala, Tyr, Leu, Phe or Asp
XXXXXXXXFXXX

SEQ ID NO: 139 - DNA, 884 bp, Oryza sativa
gactcgtcagcttagagcaccgcaagcgcgcagcagcagcaaagatgtgtggcggcgcgatcatttccgacttcatcccgcagcgggaagcccaccgcgcggccaccggcagcaagcgtgccctctgcgcctccgacttctggccgtcggcgtcgcaggaagccgccgacttcgaccacctcaccgccccctgcaccttcacccccgaccaagcggcagaggagccgaccaagaagcgggagcggaagacgctgtaccgtggcatcaggcggcggccgtgggggaagtgggcggcggagatccgcgacccggcgaagggcgcgcgcgtctggctcggcaccttcgccaccgccgaggcggcggcccgcgcctacgaccgcgccgcccgccgcatccgcggggccaaggccaaggtcaacttccccaacgaggacccgccactcgacgacccggccgccgacggccacagccacggcggcgccgccatcccgtgcagggagttcatggactacgacgccgtcatggcgggcttcttccaccagccctacgtcgtcgccgacggcgtgccggccgtgccggcggaggaggcgcccacggtggcgtacgtgcaccaccacctgccgccgcagccgcagcaggacgcggggctggagctctggagctttgataacatccacacggccgtgccgatgtgagatcgatctgatgatcattcagatcgatgctagctcatgtgtttttaattatatcttcacagcagaaacaaaaaaaagttcaattcagtttattttgttgttatacgttttaaaatgtttcattaggttttcatgttataggagtgatttatcggattgaactctcaagtgaccgacttctgagttctt

SEQ ID NO: 140 - protein, 216 aa, Oryza sativa
MCGGAIISDFIPQREAHRAATGSKRALCASDFWPSASQEAADFDHLTAPCTFTPDQAAEEPTKKRERKTLYRGIRRRPWGKWAAEIRDPAKGARVWLGTFATAEAAARAYDRAARRIRGAKAKVNFPNEDPPLDDPAADGHSHGGAAIPCREFMDYDAVMAGFFHQPYVVADGVPAVPAEEAPTVAYVHHHLPPQPQQDAGLELWSFDNIHTAVPM

SEQ ID NO: 141 - DNA, 1403 bp, Triticum aestivum
ctctccacccgcggccccacgtgctcccagccatgtgcggcggcgccatcctctccgacatcatcccgccgccgcgccgggccaccggcggcaacgtctggcgggcggacaagaagaggagggccaggcccgacgccgccgcggggaggccccgccgcgtgcccgaggaggagttccaggaggaggagggcgacgcggagttcgaggccgacttcgaggggttcgtggaggcggaggaggagtccgacggcgaggccaagcccttccccgtccgcaggaccggcttctccggagatggactgaaggcaactgctgctggtgatgatgactgtgcctcagggtctgctaaaaggaagagaaagagccagttcaggggcatccgccgccgcccttggggtaaatgggctgctgaaataagagatcctcgcaagggtgtccgtgtctggcttggcacttacaactctgctgaggaagctgccagagcctatgatgttgaagcccgcagaattcgtggcaagaaggcaaaggtcaatttcccagaagaagctcccatggatcctcagcaacgctgcgctacctctgtgaaggtgcccgagttcaacaccgaacagaagccagtactcaacaccatgggcaacacagatgtgtattcctgccctgctgttgactacaccttaaatcagcaatttgtgcagcctcagaacatgtcgtttgtgcctacagtgaatgcagttgaggctcctttcatgaatttttcctctgaccaggggagcaactcctttagttgctcagacttcagctgggagaatgatatcaagacccctgacataacttctgtgcttgcatccattcccacctcaactgaggtcaatgaatctgcatttctccagaacaatggcattaattcaacggtacctcctgtgatgggtgatgctaatgttgatcttgccgacttggagccatacatgaagttcctgatggacgatggttcagatgagtcaattgacagcattctaagctgtgatgtaccgcaggacgttgtcggcaacatgggcctttggacctttgatgacatgcccttgtctgctggtttctactgagggaatcgaggtcgctgggtgcctgtatatatagacaaaggaataagtattctggacatcaacaagtgcttgtgtctggtgcctctagaatcgagcagtagcgacgtcagtctatggttatgtctagcttaaatggtcaggagacctaagtcttttgcaatagacctctgtcttgtgcccccagactatattatatctatatatgaaaccagtatgtgatgggaactgcttattttgtattcctgtttctaccttattgtaattgctacaagtggctgtaaaccttttaactttgaaaaaaaa

SEQ ID NO: 142 - protein, 355 aa, Triticum aestivum
MCGGAILSDIIPPPRRATGGNVWRADKKRRARPDAAAGRPRRVPEEEFQEEEGDAEFEADFEGFVEAEEESDGEAKPFPVRRTGFSGDGLKATAAGDDDCASGSAKRKRKSQFRGIRRRPWGKWAAEIRDPRKGVRVWLGTYNSAEEAARAYDVEARRIRGKKAKVNFPEEAPMDPQQRCATSVKVPEFNTEQKPVLNTMGNTDVYSCPAVDYTLNQQFVQPQNMSFVPTVNAVEAPFMNFSSDQGSNSFSCSDFSWENDIKTPDITSVLASIPTSTEVNESAFLQNNGINSTVPPVMGDANVDLADLEPYMKFLMDDGSDESIDSILSCDVPQDVVGNMGLWTFDDMPLSAGFY

SEQ ID NO: 143 - DNA, 908 bp, Oryza sativa
atccaaatccaacgtccgcctaaagaaaaacacgcacacacttcttctgcttccctccccttgtttccgctccacttcccttccaagcaagaaaaccgaggcttcagcttagctaggaccgaccgatccgatgtgcggcggtgcaatcatctacgactacatcccggcgcgccgccggttgtgcgcctccgacttctggcccgacgccgacgactccgacccccacacccccgctcccgagaaaccgccgcgcgcgaagagggagcggaagaaccagtaccgcgggatcaggcagcggccgtgggggaagtgggcggcggagatccgcgacccggtgaagggggtgcgcgtctggctcggcacctacccgaccgccgaggccgccgcgcgggcctacgaccgcgccgcgcgccgcatcaggggcgccaaggcgaaggtcaacttccccaacgacttcggcgccgcccccgcgccggccgcggcggcggcgaaggccgtccctcgcgtcgcgcccacgccggccgtgctcccgccgcccaagatggaggcggtgtccgagggcgccggcgcctgctcctccgacgaggtcaaggagctgtccgaggagctgctcgcgtacgagaactacatgagcttcctcggcatcccctacatggagggcggcgccgcctccgccgccggcgccgaggaagccgcggcgcccgccgggctctggaccttcgaagactacgagctgccgtcgctagcgctctagtaaaaatgtcacaataaaaatgacatgtatgtgaaaaaatttttccctacccgtagtaagtaaccagtgtctttttttaccgtactctatgcgttatttttgttgaaattaatccattgttgaagttgtaactgtgcatggtcggcgccagtct

SEQ ID NO: 144 - protein, 207 aa, Oryza sativa
MCGGAIIYDYIPARRRLCASDFWPDADDSDPHTPAPEKPPRAKRERKNQYRGIRQRPWGKWAAEIRDPVKGVRVWLGTYPTAEAAARAYDRAARRIRGAKAKVNFPNDFGAAPAPAAAAAKAVPRVAPTPAVLPPPKMEAVSEGAGACSSDEVKELSEELLAYENYMSFLGIPYMEGGAASAAGAEEAAAPAGLWTFEDYELPSLAL

SEQ ID NO: 145 - DNA, 1574 bp, Oryza sativa
aaaggcattcgcaacacacacttgaagaaaaaaaacacgacgaacacgttaaaaaaaggtcgaagagaagtgggagacccaaaccgcgaacaatgtgtggaggcgccatcctcgccgagttcatcccggcgccgtcgcgcgccgcggcggcgaccaagcgggtgaccgccagccacctgtggccggccggctccaagaacgccgcccgcggcaagagcaagagcaagaggcagcagaggagcttcgccgacgtcgacgacttcgaggccgccttcgagcagttcgacgatgactccgacttcgacgacgcggaggaagaagacgaaggacacttcgtgttcgcgtccaaatctcgtgtcgtcgccgggcacgacgggcgcgcggcggcgagggcggcgagcaagaagaagcgggggcggcacttccgaggcatccggcagcggccatgggggaagtgggcggcggagatccgcgacccgcacaagggcacgcgcgtctggctcggcacgttcaacaccccggaggaggccgcacgcgcctacgacgtcgaggcgcgccgcctccgcggcagcaaggccaaggtcaacttccccgccacgcccgccgccgcgcgcccacgccgcggcaacacgagagccaccgccgtgccaccgccggcgacagcacccgccgccgccccgccgcgcggactgaagcgagaattctcgccgcctgctgagaccgcgctacctttcttcaccaacggcttcgtcgacctgacgaccgccgcggcgccgccaccggccatgatgatgacgagctccttcaccgacagcgtcgccacgtcggagtccggcgggagccccgccaagaaggcgaggtccgacgacgtcgactcgtccgagggcagcgtcggcggcggcagcgacacgctgggtttcaccgacgagctggagttcgacccgttcatgctgttccagctcccctactccgacggctacgagtccatcgacagcctcttcgccgccggcgacgccaacagcgcgaacaccgacatgaacgccggcgtcaacctgtggagcttcgacgacttcccaatcgacggcgcccttttctgatgtactcctccattgatgcagtttgtgcactcaattgttaatcacgtcgtcgttgatgaatgtttaaccggaggatgatggggtgcagctgatatcatggcttgcttgattaccgaattatattgcggtgtttgtgtttgtcaattagattctgaatctgtactactgccgatcttatgatcaaaactatatattaagtttatgtactcttaatttgtgggctacttttacggggtcttcgtactgctggtcaaatagtcctatgaaatcgatcatgtcggcaatatcgtcgtcaattatcgtggtcgtggttgttaatgatgtcaaataagtctatgaaaacctggtcctcttggtgtttatgtaccactgatcgatccatcatttgatctctgtcatgttgagatggatcgtgtaagaatatcataatttgctggattcagtccagtcgtaatgtattttggtttgtacaactgc

SEQ ID NO: 146 - protein, 334 aa, Oryza sativa
MCGGAILAEFIPAPSRAAAATKRVTASHLWPAGSKNAARGKSKSKRQQRSFADVDDFEAAFEQFDDDSDFDDAEEEDEGHFVFASKSRVVAGHDGRAAARAASKKKRGRHFRGIRQRPWGKWAAEIRDPHKGTRVWLGTFNTPEEAARAYDVEARRLRGSKAKVNFPATPAAARPRRGNTRATAVPPPATAPAAAPPRGLKREFSPPAETALPFFTNGFVDLTTAAAPPPAMMMTSSFTDSVATSESGGSPAKKARSDDVDSSEGSVGGGSDTLGFTDELEFDPFMLFQLPYSDGYESIDSLFAAGDANSANTDMNAGVNLWSFDDFPIDGALF

SEQ ID NO: 147 - DNA, 1451 bp, Triticum aestivum
ctttcctttcgcttagctctccacccgcggccccacgtgctcccagccatgtgcggcggcgccatcctctccgacatcatcccgccgccgcgccggcccgccggcggccgcctctggcaggcggacaggaagaagaggagggccgggccccgccgcgtgcccgaggaggagcccgaggaggaggcggaggagggcgacgaggacttcgaggccgacttcgaggggttcgtggacgaggagtccgacggcgaggtcaagcccttccccgcccgcaggagcggcttctccggagatggattgaaggcaactgctgctggtgaatatgactgtgcctcagggtctgctaaaaggaagagaaagaaccagttcaggggcatccgccgccgcccttggggtaaatgggctgctgaaataagagatcctcgcaagggtgtccgtgtctggcttggtacttacaactccgctgaggaagctgccagagcctatgatgttgaagcccgcagaattcgtggcaagaaggcaaaggtcaatttcccagaagaagctcctatggctcctcagcaacgctgcgctactgctgtgaaggtgcccgagttcaacaccgaacagaagccggtactcaacaccatgggcaacgcagatgtgtattcctgctctgctgttgactacaccttaaatcagcaatttgtgcagcctcagaacatgtcgtttgtgcctacagtgaatgcagttgaggcccctttcatgaatttttcctctgaccagggtagcaactcctttagttgctcagacttcagctgggagaatgatatcaagacccctgacataacttctgtgcttgcatccattcccacctcaacagaggtcaatgaatctgcatttctccagaacaatggcatcaattcaacggtacctcctgtgatgggtgatgctaatgttgatcttgccgacttggagccatacatgaagttcctgatggacgatggttcagatgagtcaattgacagcattctaagctgtgatgtaccccaggatgtggtcggcaacatgggcctttggacctttgatgacatgcccttgtctgctggtttctactgagggaatcgaggtcgctgggtgcctgtatatatagacaaagggaataagtattcaggacatcaacaagtgcttgtgtctggtgcctctagaattgagcagtagcgatgtcagtctatggttatgtctagcttaaatggtcaggtgactgaggtcttttgcaatagacctctgtcttgtgcccccagactatacttatatctatatatgagaccagtatgtgatggggaactgcttattttgtattcatgtttctaccttattgtaactgctacaagaggctgtaaaccttttaaatttgaagccagtgtttgttctgttgtgcttaaaaaaaaaaaaaaaaaaaaagtatctgc

SEQ ID NO: 148 - protein, 349 aa, Triticum aestivum
MCGGAILSDIIPPPRRPAGGRLWQADRKKRRAGPRRVPEEEPEEEAEEGDEDFEADFEGFVDEESDGEVKPFPARRSGFSGDGLKATAAGEYDCASGSAKRKRKNQFRGIRRRPWGKWAAEIRDPRKGVRVWLGTYNSAEEAARAYDVEARRIRGKKAKVNFPEEAPMAPQQRCATAVKVPEFNTEQKPVLNTMGNADVYSCSAVDYTLNQQFVQPQNMSFVPTVNAVEAPFMNFSSDQGSNSFSCSDFSWENDIKTPDITSVLASIPTSTEVNESAFLQNNGINSTVPPVMGDANVDLADLEPYMKFLMDDGSDESIDSILSCDVPQDVVGNMGLWTFDDMPLSAGFY

SEQ ID NO: 149 - DNA, 602 bp, Arabidopsis thaliana
gttctagtttggagttggaagcgtaaaaaacaaaaaacaaaaatgtgtgggggagctatcatttctgatttcatctggtcgaaatctgagtcagaaccgagtcaactcggctctgttagcagcaggaagaagcgtaaacccgtctcagtgagtgaagaaagagatgggaaacgagagaggaagaatctgtacagagggataaggcagaggccatggggcaaatgggcagcggagattcgtgacccgagcaaaggtgtacgtgtctggcttggcacattcaaaaccgccgacgaagctgctcgagcctacgacgttgctgccatcaaaatccgtggccggaaagccaaactgaatttcccaaacactcaagtagaagaagaagccgatactaaaccaggggggaatcaaaatgagctgatttcggaaaaccaagtagagagcttatcggaggacctgatggcattggaggattacatgagattctatcagattccggttgccgacgaccaatcggcgaccgatattggaaatttatggagctatcaagactccaattaaatctcttatttcccggccggtttgctcactcattaatatgctgc

SEQ ID NO: 150 - protein, 171 aa, Arabidopsis thaliana
MCGGAIISDFIWSKSESEPSQLGSVSSRKKRKPVSVSEERDGKRERKNLYRGIRQRPWGKWAAEIRDPSKGVRVWLGTFKTADEAARAYDVAAIKIRGRKAKLNFPNTQVEEEADTKPGGNQNELISENQVESLSEDLMALEDYMRFYQIPVADDQSATDIGNLWSYQDSN

SEQ ID NO: 151 - DNA, 1686 bp, Oryza sativa
tctctccaatattttgtcgaaccgattgagggaaaaaaaaagagaaaaagaaaagaaaaaaaagaagaagaagagagaactcgaactctcgcctaccatttcgcccccctccgcaagcaatccaccactgcatcggcggcgagggctcaccggcggcgagccatgtgcggcggcgccatcatccaccacctgaaggggcacccggaggggtcgcgccgggcgacggaggggctcctgtggcccgagaagaagaagcccaggtggggcggcggcgggaggcgccacttcggggggttcgtggaggaggacgacgaggacttcgaggccgacttcgaggagttcgaggtggactccggggactcggatttggagctcggggaggaggacgacgatgacgtcgtcgagatcaagccggccgccttcaagagggccctctccagagataacttgagcaccattaccactgccggatttgatggtcctgctgcaaagtctgccaaaagaaagagaaagaaccaattcaggggcatccgccagcgcccttggggtaagtgggctgctgaaatcagagatcctcgcaagggtgttcgtgtctggcttggcactttcaacagtgctgaagaagctgcaagagcttatgatgctgaagcacgcaggattcgtggcaagaaggccaaggtgaattttccagaggctccaacaactgctcagaagcgtcgtgctggctccaccactgctaaagcacccaagtcaagtgtggaacagaagcctactgtcaaaccagcattcaacaatcttgccaatgcaaatgcgtttgtctacccatctgctaacttcacttcaaacaagccgtttgttcagcctgataacatgccatttgttcctgcaatgaactctgctgctcctattgaggaccctatcatcaactctgaccagggaagcaactcatttggctgctctgactttggctgggagaatgataccaagacaccagatattacatcaattgctcccatttcaaccatagctgaagtcgatgaatctgcattcattaagagcagtaccaacccaatggtccctcctgttatggagaacagtgctgttgatctgcctgatttagaaccctacatgaggttccttctggatgatggtgctggtgactcaattgatagccttctcaacctggatggatcacaggatgttgtcagcaacatggacctctggagctttgatgacatgcccgttagcgatttctattgaggaattcgaagtcttctagtcggagcatgtacacagggaaaaaaaaggaataaatactattggagattgggaggcacctgcatggcaccttgggggtagcatatcgttatgtttagcttagatgcaaaaggctgcatcctgaaactctttggtgattggacctgttccctatccgctgtctatgtatggcagccatctatgagactcaagaactgcttttttttttccgttctagttttctgtcgttgctacctgtatatggctatgaacatcgtgaatccatggccattatgttttaatctatgttgttgactgctctttctttcggtctttgctgtgctgcgctatgttggtgataactagctaccatattgattttctgtacataattcatttgttgaatccgaaattaaatagtgcattgac

SEQ ID NO: 152 - protein, 365 aa, Oryza sativa
MCGGAIIHHLKGHPEGSRRATEGLLWPEKKKPRWGGGGRRHFGGFVEEDDEDFEADFEEFEVDSGDSDLELGEEDDDDVVEIKPAAFKRALSRDNLSTITTAGFDGPAAKSAKRKRKNQFRGIRQRPWGKWAAEIRDPRKGVRVWLGTFNSAEEAARAYDAEARRIRGKKAKVNFPEAPTTAQKRRAGSTTAKAPKSSVEQKPTVKPAFNNLANANAFVYPSANFTSNKPFVQPDNMPFVPAMNSAAPIEDPIINSDQGSNSFGCSDFGWENDTKTPDITSIAPISTIAEVDESAFIKSSTNPMVPPVMENSAVDLPDLEPYMRFLLDDGAGDSIDSLLNLDGSQDVVSNMDLWSFDDMPVSDFY

SEQ ID NO: 153 - DNA, 1613 bp, Oryza sativa
ctgtagcttattagcggccatgtgcggcggagcaatcatctccgggttcatcccgccgtcggccgctgcggcggcggcggcggcggcggcggcggccaagaagcagcagggcaggagggtcacggccgacgtgctgtggccggggatgctgcggaaggggaaggcgggggcggcggaggaggactttgaggccgacttccgcgagttcgagcgtggcatgagcgacgacgaggcggaggggggcggcggcgaggaggaggaggaggaggaggacgacgtggtcgtggaggtccccccgccggcgacggcgaggttcgtcgtccgtgccgcggccaaggcggcgcccccaactgcagatgggatgttgactacaaagcttgtccaacatgatggacctactgctagatcggcaaagcgcaagaggaagaatcagtacagggggatccgccagcgtccctggggcaaatgggcagctgaaatccgagaccccagcaagggtgtccgtgtttggcttggaacatataacactgctgaggaggcagctagggcatatgacgctgaagcccgcaagatccgtggcaagaaagccaaggtcaactttcctgatgaaccagctgttgctcagaagctctccctgaagcaaaacgctgccaagcaagagaaactagctccacctctgaagtcctgtggcgatgatgctttctttcagctaaacagttcagacaatgatttgtttgcaatgcttgcaaaggtgcctgcaaagccggcagagcctgttgatctcatgcctccagtcaaacctcttgcttccactgagacattcgagatgaacatgctctctgatacgagcagcaactcatttggctcttcagactttggttgggaggatgacaccctgaccccagactacacttcagtctttgttcctaatgctgccatgccagcatatggtgaacctgcttacctgacaggtggagcgccaaagagaatgaggaacaactatggtatcgccgtgccccagggaaatggcatgcctaatctcgcacaaaacatgcccaccttcgatcccgagatgaagtatttgccattaccttatgttgagagcagctcagatgaatcaatggacaaccttctgcaaaatgatgctacacaagacggggcaagcaacgagggcatctggagccttgatgagctgctcatggcagctggtgcctactgaggagacgaaatgttctggtcagtgtggtctgtcactagcaaaccatgtaaggcactccacactacctactattttgatttcttgtagatacattttcatgtttgaatgtgtatggccaagatgaagagctggtgatgtctgctatgttttgtagagggatgctaccaaagtaatgctagaatattacaagctgctatcagctgtactctctatgacaatgtttatactatgtttgctgtatggtgtggtctatgatttgaagtatgtcggagactaattcaaataatgcccttgggccatggtgctgtgccttggtaaatggtgctttatttaagggttatattaggttggtgcctcagtaattgccgttttctaccaaaaaaaaaaaaaaaaa

SEQ ID NO: 154 - protein, 396 aa, Oryza sativa
MCGGAIISGFIPPSAAAAAAAAVAKKQQGRRVTADVLWPGMLRKGKAAAAEEDFEADFREFERGMSDDEAEGGGGEEEEDDDDVVVVVPPPAAARFVVRAAAKAAPPTADGMLTTKLVQHDGPTARSAKHKRKNQYRGIRQRPWGKWAAEIRDPSKGVRVWLGTYNTAEEAARAYDAEARKIRGKKAKVNFPDEPAVAQKLSLKQNAAKQEKLAPPLKTCGDDAFFQLNSSDNDLFAMLAKVPAKPAEPVDLMPPVKPLASTETFEMNMLSDTSSNSFGSSDFGWEDDTLTPDYTSVFVPNAAMPAYGEPAYLTGGAPKRMRNNYGIAVPQGNGMPNLAQNMPTFDPEMKYLPLPYVESSSDESMDNLLQNDATQDGASNEGIWSLDELLMAAGAY

SEQ ID NO: 155 - DNA, 1068 bp, Triticum aestivum
atgtgcggcggcgccatcctctccgacatcatcccgccgccgcgccgggccaccggcggcaacgtctggcgggcggacaagaagaggagggccaggcccgacgccgccgcggggaggccccgccgcgtgcccgaggaggagttccaggaggaggagagcgacgcggagttcgaggccgacttcgaggggttcgtggaggcggaggaggagtccgacggcgaggccaagcccttccccgtccgcaggagcggcttctccggagatggattgaaggcaactgctgctggtgatgatgactgtgcttcagggtctgctaaaaggaagagaaagaaccagttcaggggcatccgccgccgcccttggggtaaatgggctgctgaaataagagatcctcgcaagggtgtccgtgcctggcttggcacttacaactctgctgaggaagctgtcagagcctatgatgttgaagcccgcagaattcgtggcaagaaggcaaagtcaatttcccagaagaagctcccatggctcctcagcaaacgctgcgctacctctgtgaaggtgcccgagttcaacaccgaacagaagccagtactcaacaccatgggcaacgcagatgtgtattcctgccctgctgttgactacaccttaaatcagcaatttgtgcagcctcagaacatgtcgtttgtgcctacagtgaatgcagttgaggctcctttcatgaatttttcctctgaccaggggagcaactcctttagttgctcagacttcagctgggagaatgatatcaagacccctgacataacttctgtgcttgcatccattcccacctcaactgaggtcaatgaatctgcatttctccagaacaatggcattaattcaacggtacctcctgtgatgggtgatgctaatgttgatcttgcctacttggagccgtacatgaagttcctgatggacgatggttcagatgagtcaattgacagcattctaagctgtgatgtaccgcaggacgttgtcggcaacatgggcctttggacctttgatgacatgcccttgtctgctggtttctactga

SEQ ID NO: 156 - protein, 355 aa, Triticum aestivum
MCGGAILSDIIPPPRRATGGNVWRADKKRRARPDAAAGRPRRVPEEEFQEEESDAEFEADFEGFVEAEEESDGEAKPFPVRRSGFSGDGLKATAAGDDDCASGSAKRKRKNQFRGIRRRPWGKWAAEIRDPRKGVRAWLGTYNSAEEAVRAYDVEARRIRGKKAKSISQKKLPWLLSKRCATSVKVPEFNTEQKPVLNTMGNADVYSCPAVDYTLNQQFVQPQNMSFVPTVNAVEAPFMNFSSDQGSNSFSCSDFSWENDIKTPDITSVLASIPTSTEVNESAFLQNNGINSTVPPVMGDANVDLAYLEPYMKFLMDDGSDESIDSILSCDVPQDVVGNMGLWTFDDMPLSAGFY

SEQ ID NO: 157 - DNA, 999 bp, Triticum aestivum
atgtgcggcgggcgccatcctctccgacatcatcccgccgcggggaggccctgccgtgcgcctgaggaggagttccaggaggaggagggcgacgcggagttcgaggccgacttcgaggggttcgtggaggcggaggaggagtccgacggcgaggccaagcccttccccgtccgcaggagcggcttctccggagatggattgaaggcaactgctgctggtgatgatgactgtgcctcagggtctgctaaaaggaagagaaagaaccagttcaggggcgtccgccgccgcccttggggtaaatgggctgctgaaataagagatcctcgcaagggtgtccgtgtctggcttggtacttacaactccgctgaggaagctgccagagcctatggtgttgaggcccgcagaattcgtggcaagaaggcaaaggtcaatttcccagaagaagctcctatggctcctcagcaacgctgcgctactgctgtgaaggtgcccgagttcaacaccgaacagaagccggtactcaacaccatgggcaacgcagatgtgtattcctgctctgctgttgactacaccttaaatcagcaatttgtgcagcctcagaacatgtcgtttgtgcctacagtgaatgcagttgaggcccctttcatgaatttttcctctgaccagggtagcaactcctttagttgctcagacctcagctgggagaatgatatcaagacccctgacataacttctgtgcttgcatccattcccacctcaacagaggtcaatgaatctgcatttctccagaacaatggcatcaattcaacggtacctcctgtgatgggtgatgctaatgttgatcttgccgacttggagccatacatgaagttcctgatggacgatggttcagatgagtcaattgacagcattctaagctgtgatgtaccccaggatgtggtcggcaacatgggcctttggacctttgatgacatgcccttgtctgctggtttctactga

SEQ ID NO: 158 - protein, 332 aa, Triticum aestivum
MCGGRHPLRHHPAAGRPCRAPEEEFQEEEGDAEFEADFEGFVEAEEESDGEAKPFPVRRSGFSGDGLKATAAGDDDCASGSAKRKRKNQFRGVRRRPWGKWAAEIRDPRKGVRVWLGTYNSAEEAARAYGVEARRIRGKKAKVNFPEEAPMAPQQRCATAVKVPEFNTEQKPVLNTMGNADVYSCSAVDYTLNQQFVQPQNMSFVPTVNAVEAPFMNFSSDQGSNSFSCSDLSWENDIKTPDITSVLASIPTSTEVNESAFLQNNGINSTVPPVMGDANVDLADLEPYMKFLMDDGSDESIDSILSCDVPQDVVGNMGLWTFDDMPLSAGFY

SEQ ID NO: 159 - DNA, 1452 bp, Arabidopsis thaliana
aaaacaacaaagcaaagcgttgaagagagaagaagaagcaaagatataacccccaaaagtatcaattagtttccattttcgccgctaagattctgttttcgaacatttacaccctcaagaatcgccgccatgtgtggaggagctataatatccgatttcattccaccgccgaggtctcgccgtgttactagcgagtttatttggccggatctgaagaagaatttgaaaggatcgaagaaaagctcgaagaatcgttcgaatttcttcgattttgacgctgagttcgaagctgatttccaaggtttcaaagatgattcgtctatcgattgcgatgatgatttcgacgtcggtgatgttttcgccgatgtgaaaccattcgttttcacttcgactccaaaacccgccgtctccgccgctgcggaaggttcagtttttggtaagaaagttactggcttggatggggacgctgagaaatctgcaaataggaagaggaagaatcagtaccgagggattaggcaacgtccttggggaaaatgggctgctgagatacgtgatccaagggaaggtgctagaatctggcttggaacgttcaagacagctgaggaagctgctagagcttacgatgctgcagcgcggagaatccgtggatctaaagctaaggtgaatttccctgaagaaaacatgaaggctaattctcagaaacgctctgtgaaggctaatcttcagaaaccagtggctaaacctaaccctaacccaagtccagctttggttcagaactcgaacatctcctttgaaaatatgtgtttcatggaggagaaacaccaagtgagcaacaacaacaacaaccagtttgggatgacaaactccgttgatgctggatgtaatgggtatcagtatttcagctctgaccagggtagtaattctttcgattgttcggagtttggttggagcgatcaagctccgataactcccgacatctcttctgcggttatcaacaacaacaactcagctctgttctttgaggaagccaatccagctaagaagctcaagtctatggatttcgagacaccttacaacaacactgaatgggacgcttcactggatttcctcaacgaagatgctgtaacgactcaggacaatggtgcaaaccctatggacctatggagtattgatgaaattcattccatgattggaggagtcttctgaagagatccagtttcatgagttcctgtttgcattgcgagaagccatgagcctctatcttgagggtagttgtgatgaagttaagtagaggcttatttttaggggttgtggtagtttttgttttagtgaatcttttgaattcgtttgtgttttgtttttgttactttatgccccaaaactcctttaacatttgtcataatgtgtttgaacctctcatctgtttaatcaaataaatcttctttgtatgct

SEQ ID NO: 160 - protein, 358 aa, Arabidopsis thaliana
MCGGAIISDFIPPPRSRRVTSEFIWPDLKKNLKGSKKSSKNRSNFFDFDAEFEADFQGFKDDSSIDCDDDFDVGDVFADVKPFVFTSTPKPAVSAAAEGSVFGKKVTGLDGDAEKSANRKRKNQYRGIRQRPWGKWAAEIRDPREGARIWLGTFKTAEEAARAYDAAARRIRGSKAKVNFPEENMKANSQKRSVKANLQKPVAKPNPNPSPALVQNSNISFENMCFMEEKHQVSNNNNNQFGMTNSVDAGCNGYQYFSSDQGSNSFDCSEFGWSDQAPITPDISSAVINNNNSALFFEEANPAKKLKSMDFETPYNNTEWDASLDFLNEDAVTTQDNGANPMDLWSIDEIHSMIGGVF

SEQ ID NO: 161 - DNA, 1568 bp, Arabidopsis thaliana
aaaaacaacaaagcaaagcgttgaagagagaagaagaagcaaagatataacccccaaaagtatcaattagtttccattttcgccgctaagattctgttttcgaacatttacaccctcaagaatcgccgccatgtgtggaggagctataatatccgatttcattccaccgccgaggtctcgccgtgttactagcgagtttatttggccggatctgaagaagaatttgaaaggatcgaagaaaagctcgaagaatcgttcgaatttcttcgattttgacgctgagttcgaagctgatttccaaggtttcaaagatgattcgtctatcgattgcgatgatgatttcgacgtcggtgatgttttcgccgatgtgaaaccattcgttttcacttcgactccaaaacccgccgtctccgccgctgcggaaggttcagtttttggtaagaaagttactggcttggatggggaagctgagaaatctgcaaataggaagaggaagaatcagtaccgagggattaggcaacgtccttggggaaaatgggctgctgagatacgtgatccaagggaaggtgctagaatctggcttggaacgttcaagacagctgaggaagctgctagagcttacgatgctgcagcgcggagaatccgtggatctaaagctaaggtgaatttccctgaagaaaacctgaaggctaattctcagaaacgctctgtgaaggctaatcttcagaaaccagtggctaaacctaaccctaacccaagtccagctttggttcagaactcgaacatctcctttgaaaatatgtgtttcatggaggagaaacaccaagtgagcaacaacaacaacaaccagtttgggatgacaaactccgttgatgctggatgtaatgggtatcagtatttcagctctgaccagggtagtaattctttcgattgttcggagtttggttggagcgatcaagctccgataactcccgacatctcttctgcggttatcaacaacaacaactcagctctgttctttgaggaagccaatccagctaagaagctcaagtctatggatttcgagacaccttacaacaacactgaatgggacgcttcactggatttcctcaacgaagatgctgtaacgactcaggacaatggtgcaaaccctatggacctatggagtattgatgaaattcattccatgattggaggagtcttctgaagagatccagtttcatgtaaataaggctgcatgtttgtgagtttcccgcatcgttcgtttatcaacctccaaaactttctaatgtctgttacttgcatcttcttctgctgtctctgtctgtctctctcaggagttcctgtttgcattgcgagaagccatgagcctctatcttgagggtagttgtgatgaagttaagtagaggcttatttttaggggttgtggtagtttttgttttagtgaatcttttgaattcgtttgtgttttgtttttgttactttatgccccaaaactcctttaacatttgtcataatgtgtttgaacctcctcatctgtttaatcaaataaatcttctttgtatgct

SEQ ID NO: 162 - protein, 358 aa, Arabidopsis thaliana
MCGGAIISDFIPPPRSRRVTSEFIWPDLKKNLKGSKKSSKNRSNFFDFDAEFEADFQGFKDDSSIDCDDDFDVGDVFADVKPFVFTSTPKPAVSAAAEGSVFGKKVTGLDGEAEKSANRKRKNQYRGIRQRPWGKWAAEIRDPREGARIWLGTFKTAEEAARAYDAAARRIRGSKAKVNFPEENLKANSQKRSVKANLQKPVAKPNPNPSPALVQNSNISFENMCFMEEKHQVSNNNNNQFGMTNSVDAGCNGYQYFSSDQGSNSFDCSEFGWSDQAPITPDISSAVINNNNSALFFEEANPAKKLKSMDFETPYNNTEWDASLDFLNEDAVTTQDNGANPMDLWSIDEIHSMIGGVF

SEQ ID NO: 163 - DNA, 1644 bp, Arabidopsis thaliana
ggagagtaacatcgagacaaagaagaaaaactaaaaaagagaaccccaaagaatcgaatatttattatttcgccccgaagattctatttctgatcatttacacccctaaaaagagtagagctttcgtgaagccaccatgtgtggaggagctataatctccgatttcatacctccgccgaggtccctccgcgtcactaacgagtttatctggccggatctgaaaaacaaagtgaaagcttcaaagaagagatcgaataagcgatccgatttcttcgatcttgacgatgatttcgaagctgatttccaagggtttaaggatgactcggcttttgactgcgaagacgatgatgatgtcttcgtcaatgttaagcctttcgtcttcaccgcaactactaagcccgtagcttccgctttcgtctccactggtatatatttggtaggttcagcatatgccaagaaaactgtagagtccgctgagcaagctgagaaatcttctaagaggaagaggaagaatcaataccgagggattaggcagcgtccttggggaaaatgggctgcggagatccgtgatccgagaaaaggctcccgagaatggcttggaacattcgacactgctgaggaagcagcaagagcttatgatgctgcagcacgcagaatccgtggcacgaaagctaaggtgaattttcccgaggagaagaaccctagcgtcgtatcccagaaacgtcctagtgctaagactaataatcttcagaaatcagtggctaaaccaaacaaaagcgtaactttggttcagcagccaacacatctgagtcagcagtactgcaacaactcctttgacaactcttttggtgatatgagtttcatggaagagaagcctcagatgtacaacaatcagtttgggttaacaaactcgttcgatgctggaggtaacaatggataccagtatttcagttccgatcagggcagtaactccttcgactgttctgagttcgggtggagtgatcacggccctaaaacacccgagatctcttcaatgcttgtcaataacaacgaagcatcatttgttgaagaaaccaatgcagccaagaagctcaaaccaaactctgatgagtcagacgatctgatggcataccttgacaacgccttgtgggacaccccactagaagtggaagccatgcttggcgcagatgctggtgctgtgactcaggaagaggaaaacccagtggagctatggagcttagatgagatcaatttcatgctggaaggagacttttgaagtgatcgatggttccttagtttgtaaataaagctgtgttggattttgctgttgggggatggtacaagtcacacctcaagctctatgcattggtatctcatgagcctctcttccatagagagtttctcttttaattttgtcgaaataaaaaaggtgtgatgaagtaaatagaggtataataatatctatctattaagtcttgttttgttctttcatttttgtatttcttttctatttaaaagacagtttattagtcttctgagctctctttttgatctttgttatagcgtatcatcaccctcgaaagtgtaatgttttgtacccccaaacttgtttagcattataataaagtctctttggaacttctc

SEQ ID NO: 164 - protein, 379 aa, Arabidopsis thaliana
MCGGAIISDFIPPPRSLRVTNEFIWPDLKNKVKASKKRSNKRSDFFDLDDDFEADFQGFKDDSAFDCEDDDDVFVNVKPFVFTATTKPVASAFVSTGIYLVGSAYAKKTVESAEQAEKSSKRKRKNQYRGIRQRPWGKWAAEIRDPRKGSREWLGTFDTAEEAARAYDAAARRIRGTKAKVNFPEEKNPSVVSQKRPSAKTNNLQKSVAKPNKSVTLVQQPTHLSQQYCNNSFDNSFGDMSFMEEKPQMYNNQFGLTNSFDAGGNNGYQYFSSDQGSNSFDCSEFGWSDHGPKTPEISSMLVNNNEASFVEETNAAKKLKPNSDESDDLMAYLDNALWDTPLEVEAMLGADAGAVTQEEENPVELWSLDEINFMLEGDF

SEQ ID NO: 165 - DNA, 1632 bp, Arabidopsis thaliana
ggagagtaacatcgagacaaagaagaaaaactaaaaaagagaaccccaaagaatcgaatatttattatttcgccccgaagattctatttctgatcatttacacccctaaaaagagtagagctttcgtgaagccaccatgtgtggaggagctataatctccgatttcatacctccgccgaggtccctccgcgtcactaacgagtttatctggccggatctgaaaaacaaagtgaaagcttcaaagaagagatcgaataagcgatccgatttcttcgatcttgacgatgatttcgaagctgatttccaagggtttaaggatgactcggcttttgactgcgaagacgatgatgatgtcttcgtcaatgttaagcctttcgtcttcaccgcaactactaagcccgtagcttccgctttcgtctccactgtaggttcagcatatgccaagaaaactgtagagtccgctgagcaagctgagaaatcttctaagaggaagaggaagaatcaataccgagggattaggcagcgtccttggggaaaatgggctgcggagatccgtgatccgagaaaaggctcccgagaatggcttggaacattcgacactgctgaggaagcagcaagagcttatgatgctgcagcacgcagaatccgtggcacgaaagctaaggtgaattttcccgaggagaagaaccctagcgtcgtatcccagaaacgtcctagtgctaagactaataatcttcagaaatcagtggctaaaccaaacaaaagcgtaactttggttcagcagccaacacatctgagtcagcagtactgcaacaactcctttgacaactcttttggtgatatgagtttcatggaagagaagcctcagatgtacaacaatcagtttgggttaacaaactcgttcgatgctggaggtaacaatggataccagtatttcagttccgatcagggcagtaactccttcgactgttctgagttcgggtggagtgatcacggccctaaaacacccgagatctcttcaatgcttgtcaataacaacgaagcatcatttgttgaagaaaccaatgcagccaagaagctcaaaccaaactctgatgagtcagacgatctgatggcataccttgacaacgccttgtgggacaccccactagaagtggaagccatgcttggcgcagatgctggtgctgtgactcaggaagaggaaaacccagtggagctatggagcttagatgagatcaatttcatgctggaaggagacttttgaagtgatcgatggttccttagtttgtaaataaagctgtgttggattttgctgttgggggatggtacaagtcacacctcaagctctatgcattggtatctcatgagcctctcttccatagagagtttctcttttaattttgtcgaaataaaaaaggtgtgatgaagtaaatagaggtataataatatctatctattaagtcttgttttgttctttcatttttgtatttcttttctatttaaaagacagtttattagtcttctgagctctctttttgatctttgttatagcgtatcatcaccctcgaaagtgtaatgttttgtacccccaaacttgtttagcattataataaagtctctttggaacttctc

SEQ ID NO: 166 - protein, 375 aa, Arabidopsis thaliana
MCGGAIISDFIPPPRSLRVTNEFIWPDLKNKVKASKKRSNKRSDFFDLDDDFEADFQGFKDDSAFDCEDDDDVFVNVKPFVFTATTKPVASAFVSTVGSAYAKKTVESAEQAEKSSKRKRKNQYRGIRQRPWGKWAAEIRDPRKGSREWLGTFDTAEEAARAYDAAARRIRGTKAKVNFPEEKNPSVVSQKRPSAKTNNLQKSVAKPNKSVTLVQQPTHLSQQYCNNSFDNSFGDMSFMEEKPQMYNNQFGLTNSFDAGGNNGYQYFSSDQGSNSFDCSEFGWSDHGPKTPEISSMLVNNNEASFVEETNAAKKLKPNSDESDDLMAYLDNALWDTPLEVEAMLGADAGAVTQEEENPVELWSLDEINFMLEGDF

SEQ ID NO: 167 - DNA, 1629 bp, Arabidopsis thaliana
ggagagtaacatcgagacaaagaagaaaaactaaaaaagagaaccccaaagaatcgaatatttattatttcgccccgaagattctatttctgatcatttacacccctaaaaagagtagagctttcgtgaagccaccatgtgtggaggagctataatctccgatttcatacctccgccgaggtccctccgcgtcactaacgagtttatctggccggatctgaaaaacaaagtgaaagcttcaaagaagagatcgaataagcgatccgatttcttcgatcttgacgatgatttcgaagctgatttccaagggtttaaggatgactcggcttttgactgcgaagacgatgatgatgtcttcgtcaatgttaagcctttcgtcttcaccgcaactactaagcccgtagcttccgctttcgtctccactggttcagcatatgccaagaaaactgtagagtccgctgagcaagctgagaaatcttctaagaggaagaggaagaatcaataccgagggattaggcagcgtccttggggaaaatgggctgcggagatccgtgatccgagaaaaggctcccgagaatggcttggaacattcgacactgctgaggaagcagcaagagcttatgatgctgcagcacgcagaatccgtggcacgaaagctaaggtgaattttcccgaggagaagaaccctagcgtcgtatcccagaaacgtcctagtgctaagactaataatcttcagaaatcagtggctaaaccaaacaaaagcgtaactttggttcagcagccaacacatctgagtcagcagtactgcaacaactcctttgacaactcttttggtgatatgagtttcatggaagagaagcctcagatgtacaacaatcagtttgggttaacaaactcgttcgatgctggaggtaacaatggataccagtatttcagttccgatcagggcagtaactccttcgactgttctgagttcgggtggagtgatcacggccctaaaacacccgagatctcttcaatgcttgtcaataacaacgaagcatcatttgttgaagaaaccaatgcagccaagaagctcaaaccaaactctgatgagtcagacgatctgatggcataccttgacaacgccttgtgggacaccccactagaagtggaagccatgcttggcgcagatgctggtgctgtgactcaggaagaggaaaacccagtggagctatggagcttagatgagatcaatttcatgctggaaggagacttttgaagtgatcgatggttccttagtttgtaaataaagctgtgttggattttgctgttgggggatggtacaagtcacacctcaagctctatgcattggtatctcatgagcctctcttccatagagagtttctcttttaattttgtcgaaataaaaaaggtgtgatgaagtaaatagaggtataataatatctatctattaagtcttgttttgttctttcatttttgtatttcttttctatttaaaagacagtttattagtcttctgagctctctttttgatctttgttatagcgtatcatcaccctcgaaagtgtaatgttttgtacccccaaacttgtttagcattataataaagtctctttggaacttctc

SEQ ID NO: 168 - protein, 374 aa, Arabidopsis thaliana
MCGGAIISDFIPPPRSLRVTNEFIWPDLKNKVKASKKRSNKRSDFFDLDDDFEADFQGFKDDSAFDCEDDDDVFVNVKPFVFTATTKPVASAFVSTGSAYAKKTVESAEQAEKSSKRKRKNQYRGIRQRPWGKWAAEIRDPRKGSREWLGTFDTAEEAARAYDAAARRIRGTKAKVNFPEEKNPSVVSQKRPSAKTNNLQKSVAKPNKSVTLVQQPTHLSQQYCNNSFDNSFGDMSFMEEKPQMYNNQFGLTNSFDAGGNNGYQYFSSDQGSNSFDCSEFGWSDHGPKTPEISSMLVNNNEASFVEETNAAKKLKPNSDESDDLMAYLDNALWDTPLEVEAMLGADAGAVTQEEENPVELWSLDEINFMLEGDF

SEQ ID NO: 169 - DNA, 1071 bp, Arabidopsis thaliana
ataaaggcatttcagctccaccgtaggaaactttctcttgaaagaaacccacagcaacaaacagagaaaatgtgtggcggtgctattatttccgattatgcccctctcgtcaccaaggccaagggccgtaaactcacggctgaggaactctggtcagagctcgatgcttccgccgccgacgacttctggggtttctattccacctccaaactccatcccaccaaccaagttaacgtgaaagaggaggcagtgaagaaggagcaggcaacagagccggggaaacggaggaagaggaagaatgtttatagagggatacgtaagcgtccatggggaaaatgggcggctgagattcgagatccacgaaaaggtgttagagtttggcttggtacgttcaacacggcggaggaagctgccatggcttatgatgttgcggccaagcagatccgtggtgataaagccaagctcaacttcccagatctgcaccatcctcctcctcctaattatactcctccgccgtcatcgccacgatcaaccgatcagcctccggcgaagaaggtctgcgttgtctctcagagtgagagcgagttaagtcagccgagtttcccggtggagtgtataggatttggaaatggggacgagtttcagaacctgagttacggatttgagccggattatgatctgaaacagcagatatcgagcttggaatcgttccttgagctggacggtaacacggcggagcaaccgagtcagcttgatgagtccgtttccgaggtggatatgtggatgcttgatgatgtcattgcgtcgtatgagtaaaagaaaaaaaataagtttaaaaaaagttaaataaagtctgtaatatatatgtaaccgccgttacttttaaaaggtttttaccgtcgcattggactgctgatgatgtctgttgtgtaatgtgtagaatgtgaccaaatggacgttatattacggtttgtggtattattagtttcttagatggaaaaacttacatgtgtaaataagatttgtaatgtaagacgaagtacttataacttcttaactgttttgtggtag

SEQ ID NO: 170 - protein, 248 aa, Arabidopsis thaliana
MCGGAIISDYAPLVTKAKGRKLTAEELWSELDASAADDFWGFYSTSKLHPTNQVNVKEEAVKKEQATEPGKRRKRKNVYRGIRKRPWGKWAAEIRDPRKGVRVWLGTFNTAEEAAMAYDVAAKQIRGDKAKLNFPDLHHPPPPNYTPPPSSPRSTDQPPAKKVCVVSQSESELSQPSFPVECIGFGNGDEFQNLSYGFEPDYDLKQQISSLESFLELDGNTAEQPSQLDESVSEVDMWMLDDVIASYE

SEQ ID NO: 171 - DNA, 1433 bp, Oryza sativa
agactacaagccattaaacagagacgaccaacgacttaaccacacttcttctttgtgctgtccaacctccattgttgggtgtgaaagctttggctcatctgccatgtgtggaggatccattctcggcgaccttcacttgccggtgcggcggacagtgaacgccggtgacctgtggggagacgccggcaagggtagagatggtggcgacggcttgaagaagaggaaggggagttcttgggatttcgatgttgattgcgatgatgatgatgatgatgactttgaggctgattttgaggagtttgaggatgactatggcgatgatgatgatgtgggtttcggggacgacgaccaagaatccgacatgaacggtctcaagctcgccggattcagcaccacgaagctcggcctcggcggcagcaggaagaggaagacgcgataccgagggatccggcagcggccatgggggaaatgggcggcggagatcagggacccccgcaagggcgtccgcgtctggctcggcacgttcggcaccgccgaggaggccgccatggcgtacgacgtcgaggcacgccgcatccgcggcaagaaagccaaggtcaacttccccgacgccgccgccgccgccccgaagcggccacggcgttcttcggcgaagcattcgccgcagcagcagaaggccaggtcgtcgtcgtcgtcgccggcgagcctgaacgccagcgacgccgtgtccaagtccaacaacaaccgcgtcagctcggctgggagcagcaccgacgccaccgccgccgccatcgccatcgacgacggcgtcaagctcgagctgctctcggagacggatccttctccgcccatggccgccgccgccgccgcgtggctcgacgcgttcgagctgaacgatcttgacggatcaagatgcaaggacaacgcattcgatcaccagattcacaaggtagaagcggctgtcgctgatgaattcgcgttctacgacgatccgagctacatgcagctgggttaccagctcgatcagggcaactcgtacgagaacatcgacgcgctcttcggcggcgaggccgtcaacattggtggactctggagcttcgacgacatgccaatggagttcagagcttattgagcatttgattctatttaggagggagtgaattatttgggaggaagaatcgatgttgtaacttgtaaaatctctgatgatgatctctgcatcatatgatcaatttgagtgcagttttgtttttgtaaatacgaattctttattatgatgttaggttcttaatttgcccttcttcatcagggatttgttcaggcttttgttgtgatgactgattggacgagggaaagattgcgttttttgttgtcatgttgggtactctactcttctgttcctaaagttgataagtgccaaaatttgtgagagg

SEQ ID NO: 172 - protein, 342 aa, Oryza sativa
MCGGSILGDLHLPVRRTVNAGDLWGDAGKGRDGGDGLKKRKGSSWDFDVDCDDDDDDDFEADFEEFEDDYGDDDDVGFGDDDQESDMNGLKLAGFSTTKLGLGGSRKRKTRYRGIRQRPWGKWAAEIRDPRKGVRVWLGTFGTAEEAAMAYDVEARRIRGKKAKVNFPDAAAAAPKRPRRSSAKHSPQQQKARSSSSSPASLNASDAVSKSNNNRVSSAGSSTDATAAAIAIDDGVKLELLSETDPSPPMAAAAAAWLDAFELNDLDGSRCKDNAFDHQIHKVEAAVADEFAFYDDPSYMQLGYQLDQGNSYENIDALFGGEAVNIGGLWSFDDMPMEFRAY

SEQ ID NO: 173 - DNA, 749 bp, Oryza sativa
ctcgcgccatccaagcgcccgcctctatatatgcgcgccgccaccatgtccagctccggcaactagctactgcgaagtgcgaactgatcagatcgtcgagaggaaacccaagatccaacgacgacatgtgtggcggcgcgattctggctaacatcataccggccaccccacgcccccgcaagtgccgccccaccaccgccaccgccacccccaaggcgacgacaccgaacgtcgtcgtcgtcgtcaacctcgtcgacaaagaggccgaggtcagcgagagctccggtgccagcagcagcgcgctgccggacttctcgtggcagggcatgtcggcgtcgtccgacgacgacgccgcggcgcagcaggcactcctcgacgccgccggcggcgccaagaagcgtccccggagcgagccccacgtcacctccgacgacgaagtgctcccggcgtcattcgacagtgacaacaacaccgccgccgccggcctgctcccgctcgacgatcctttcttgttcggcgaccagttcggcgacctcaacggcggcgcgttcgcctcgctcatggacgggctgttcgccgccggtgaagcgaacgtcgccggcgagagcgtggggctctggagcttcggcgacgactttctcaacgcgtcgtactattagctagggcttccatagttcttgtactttacttgtactgtactgtattgtactgattgttaacgttgccataaagcaatcttgctagtttgt

SEQ ID NO: 174 - protein, 321 aa, Oryza sativa
MCGGAILANIIPATPPRPATAAHVWPGGDGEKRRKVGGGGCDDDFEAAFERFGREDSEMEEEEVEEVVVGKKAAVRRRRATPAAGRRARPSKYWGVRRRPWGKWAAEIRDPVEGVRVWLGTFATAEAAAHAYDAAARDLRGATAKLNFPSSSSSTAATPRPRKCRPTTATATPKATTPNVVVVVNLVDKEAEVSESSGASSSALPDFSWQGMSASSDDDAAAQQALLDAAGGAKKRPRSEPHVTSDDEVLPASFDSDNNTAAAGLLPLDDPFLFGDQFGDLNGGAFASLMDGLFAAGEANVAGESVGLWSFGDDFLNASYY

SEQ ID NO: 175 - DNA, 1192 bp, Oryza sativa
tcatcacaagctcacaagttcacaacccaacacccaaaagcaaaagaaaagcagcaaccaaagatgtgcggcggagcgatccttgcggagctcataccgagcgcgccggcggcgaggcgcgtcacggcgggccacgtctggccgggcgacgccaacaaggccaagaagaagggcgcgcgcgccgacgacttcgaggccgcgttccgcgacttcgacaacgactccgatgacgaggagatgatggtggaggaggcggaggaggaggaggcgacctccgagcacaagccgttcgtcttccgcgccaagaaggcggcggcggcggcgtcgagcaggcgcaggaagccggcgcagtacaggggcgtgcggcgccggccgtgggggaagtgggcggcggagatccgcgaccccgtcaagggcatccgcgtctggctcggcaccttcaccaacgccgaggccgccgcgctcgcctacgacgacgccgcgcgcgccatccgcggggacagggccaagctcaacttcccttccgctaccacccctgacacccgcaagcgcggccgcgccaccgccgccgccgccccggccgtcaaggcgaccccggtcatcaacctcgtcgaggaggaggacgaggaggaggtcgccgccgccatggcgtccatcaagtacgagcccgagaccagcgagagctccgagtcgaacgccctcccggacttctcctggcagggcatgtcggcctccgacgagttcgccgtcgccgcggcggcgctgtcgctcgacagcgacgacgacctcgccaagaagcgtccgaggaccgagccggaggacaccaccgactccggctccggcgacgacaccgacgcgctgttcgacgcgctgctgttcgccgaccagtacaaccacttcaacggcggcgcctacgagtccctggacagcctgttcagcgccgacgccgtgcagaccaccgccgccgccgccgccgccgaccagggcatggggctctggagcttcgacgacggctgctgcctcgtcgacgtcgaggccagcttgtccttctaggctctagccgtcgtctccggcgaccctgtgactcgatcttgtaccatgtcatgtacatagaagagtggttttgccaagcaagcatgtgttcgtcctggttcctttcggtaatgaaaaattatgtgaggcttctcgttct

SEQ ID NO: 176 - protein, 329 aa, Oryza sativa
MCGGAILAELIPSAPAARRVTAGHVWPGDANKAKKKGARADDFEAAFRDFDNDSDDEEMMVEEAEEEEATSEHKPFVFRAKKAAAAASSRRRKPAQYRGVRRRPWGKWAAEIRDPVKGIRVWLGTFTNAEAAALAYDDAARAIRGDRAKLNFPSATTPDTRKRGRATAAAAPAVKATPVINLVEEEDEEEVAAAMASIKYEPETSESSESNALPDFSWQGMSASDEFAVAAAALSLDSDDDLAKKRPRTEPEDTTDSGSGDDTDALFDALLFADQYNHFNGGAYESLDSLFSADAVQTTAAAAAADQGMGLWSFDDGCCLVDVEASLSF

SEQ ID NO: 177 - DNA, 789 bp, Arabidopsis thaliana
atgtgcggaggagctgtaatttccgattacatagcgccggagaagattgcgagatcatctggaaagtcttcctggagaagtaatggcgtctttgactgctcaatctacgatttcgatggaaatttcgatgaattagagtccgatgagccatttgtcttctcctctactcacaaacatcatgcttcaggctcagcatcagatgggaagaagaaacagagcagtcggtacaaaggaatcagaagaaggccttggggaagatgggcggctgagatacgtgatccaatcaaaggagttcgagtttggctcgggactttcaacacagctgaagaagctgcaagagcttatgatcttgaagctaagagaatccgtggagccaaagctaagctcaatttccctaacgaatcctctggaaagaggaaagccaaggctaagactgtgcaacaggtagaggagaatcatgaggctgatcttgatgtggcggtggtaagctcagcgcctagtagtagctgtcttgatttcttgtgggaggagaataatccggacacgcttctgattgatacacaatggctcgaagatatcatcatgggcgatgcgaataagaaacatgaacctaatgatagtgaagaagccaacaacgttgatgcttctctgctttctgaagagcttcttgcttttgagaaccagaccgaatatttctcgcagatgccttttacggagggaaactgtgattcctcaacgtctctgagtagtctctttgatggaggcaatgacatgggtctatggtcctga

SEQ ID NO: 178 - protein, 262 aa, Arabidopsis thaliana
MCGGAVISDYIAPEKIARSSGKSSWRSNGVFDCSIYDFDGNFDELESDEPFVFSSTHKHHASGSASDGKKKQSSRYKGIRRRPWGRWAAEIRDPIKGVRVWLGTFNTAEEAARAYDLEAKRIRGAKAKLNFPNESSGKRKAKAKTVQQVEENHEADLDVAVVSSAPSSSCLDFLWEENNPDTLLIDTQWLEDIIMGDANKKHEPNDSEEANNVDASLLSEELLAFENQTEYFSQMPFTEGNCDSSTSLSSLFDGGNDMGLWS

SEQ ID NO: 179 - DNA, 1430 bp, Oryza sativa
cccgcgtcgcgccatagcgacgtctctcccggagaaagaagagcgcgccgcgccatgtgcggcggtgcaatcctcgccgatttcaccccggcgagggtgccccggcggctgaccgccgccgagctcctgccggtgaccccgactccccccgccgccgagaggagaaccacccggaagcgcaagtccgacgtcgacttcgaggcggagttcgagcttttcgaggacgacgacgacgacgatgagttcgagctttccgacgatggcgacgagagtttggccgtgtcatgtgtgtcgtcccccaagtcgaaggcagtaccttcgttttctttttcgtcggatgtctcctcgagctccaggccgcggcggcgcgtggcggcggcggcggccggtcgtcggaaggcgagcaagaagagcaagtacaggggcgtccggcgccggccgtcggggaggttcgcggcggagatcagggaccccaagaaggggcggcgcgtgtggctcggcacgtacggcagcgccgaggaggccgccatggcctacgaccgcgaggcccgccgcatccgcggcaagggcgcgaggctcaacttcccccgcgacggcgatggctcccctcgccggagtaacgaccggccctgctggaccatcgacctcaacctccccgcggcggccgtctccggtgacgacgacgacgccatggccgtcgacgccgcagacgcagacgcaggcagtgctggccgtgcagcagcctatgcagatcaagaagcactgagcgcggcaaagtgcaagatcaagcagtgtcctcgcgacgaacagatggcgagcgccacacctgagctcatggaggaggacgcgagcagcagcagaaacatggtgcccctgtccatggcgctgcagctgcagtatgcggcgatgatcgccgaatgcgaccgcgagatggaggagatcgccgccgtggagagggacctcgagaggcgcaggaggcaggtgttcgagcgcagaggccacctggtcaggcaggcctctcttctgctcgactgacgatcttgctgaactgaactctgaatgtttgagcttgtctgaagtctgaactctgcactatgccatatggtgtttcaccttcactgtgaggctgacatgtgggccagacgtccgtttgccttgcttgcttttgagctgcaactgggcgttgtgctgcaagcctgcaaagtgcctgtgtaaagtttgtgggattgtgtgtgtggatcttgtatccttgtgactttgcaagctttaattttgtgaggaacaatagtattttagattggtgtgtaaaatatagaaataaataatagtagcaactaaattttggttttcagctcttcatcagatggtttgtcatgggaacaaaatttcaaacatgagcaaattaaggtcatgttattatcaattgtgat

SEQ ID NO: 180 - protein, 326 aa, Oryza sativa
MCGGAILADFTPARVPRRLTAAELLPVTPTPPAAERRTTRKRKSDVDFEAEFELFEDDDDDDEFELSDDGDESLAVSCVSSPKSKAVPSFSFSSDVSSSSRPRRRVAAAAAGRRKASKKSKYRGVRRRPSGRFAAEIRDPKKGRRVWLGTYGSAEEAAMAYDREARRIRGKGARLNFPRDGDGSPRRSNDRPCWTIDLNLPAAAVSGDDDDAMAVDAADADAGSAGRAAAYADQEALSAAKCKIKQCPRDEQMASATPELMEEDASSSRNMVPLSMALQLQYAAMIAECDREMEEIAAVERDLERRRRQVFERRGHLVRQASLLLD

SEQ ID NO: 181 - DNA, 1049 bp, Oryza sativa
agaagaaaagccttgtgagttggtaattgatagtagcaagacaatgtgtgggggagcgatcatcgccgacttcgtcccgcccgccggcgcccgccgcgccgctgcctccgacatctccgacaacgccgtcctctccgctgccggtgccggtgacgagtcgttcgcggcggccaaggcgccggcgccggggaggaagacggcgtaccgcggcatccggcgccggccgtggggacgctgggcggcggagatccgcgacccgaggaagggcgcccgcgtctggctcggcacctacgccaccgccgaggaggccgcccgcgcctacgacgtcgcggcgcgcgacatccgcggcgccaaggccaagctcaacttccccccgaccatcggcgccgccgccgcgccaccgccgcccaagaagcgacgcaaagccgccgccgcggcgaaccaccaccaccaccaccaccagcaggagagctcaggctcctcgtcggcgtcgtcgctgcctcccaccccgccgccggccgccgagcaccagctccgcgagtgcatgtccgggctggaggcgttcttgggcctcgaggaggaggaggacgacggcggcgccggtgagccatgggacgccgtcgacatgatgctcgagtaggctcgccgggaatggcagcgttgccatgctcatgcatccaagcttattcatgcatgcagcagcaagatatacaactttagtactactactatgttaattactacttactgcgtaggtaaatgaaataaaatggggttggttaattagggtgttcttctgggaatccttggctttgctaattgctagtactactatgtactttggcgttaagcattgcattgccaggtgatgcatgtcatgtaatcgtggtaattatatggccgtcctcctagagctagctagcagattagatttactatataaagtggtagtagaaatatatgtcctcctagagctaactagtgtcttgtaatgatttcagacttcttgggcaacatgagcaatgcatttcgacttccactttacatct

SEQ ID NO: 182 - protein, 198 aa, Oryza sativa
MCGGAIIADFVPPAGARRAAASDISDNAVLSAAGAGDESFAAAKAPAPGRKTAYRGIRRRPWGRWAAEIRDPRKGARVWLGTYATAEEAARAYDVAARDIRGAKAKLNFPPTIGAAAAPPPPKKRRKAAAAANHHHHHHQQESSGSSSASSLPPTPPPAAEHQLRECMSGLEAFLGLEEEEDDGGAGEPWDAVDMMLE

SEQ ID NO: 183 - DNA, 1164 bp, Oryza sativa
acctcgctctcctcgtcaccgcgatcgatcgatcgccgccggtttagatttccttcctacgcggaccgcacccacgcgctaggtttagctagctagtttgcttgcgcgcaagcgtcgatcgagctagctagtgaagatagatatgtgcggcggcgccatcccgctgatcagcagccgcggccccggcggcaagaggagcctctccgccgccgatgagctctggccgccgccgccgcagcacgccagcgacgacccggccgagcaagcggcggcggatgaggaggagcaggagcagcagccggcggcgaggaggcagcggcgaggggagcggaggacgctgtaccggggcatccggcgcaggccgtgggggaaatgggcggcggagatccgcgacccggccaagggcgcccgcgtctggctcggcaccttcgccaccgccgaggctgccgcgcgggcctacgaccgcgccgcccgccgcatccgcggcaccaaggccaaggtcaacttccccaacgaggacaacgccttcgccgccgcgccgccgccgtaccacctcgccgcctactacggcgacgcctcctccacctcctacctctacccgatggccatgacgcccgccgccgccggactgagggagcagcagctgatgacgacgacggcggtggagtacagcgttaatgacgccgtcgacgtggccagcgtttacttccagccgccgccgccggcggttgcttacgagttcagcgccgtcggcggtggcgccgtcgtcgtgccggtgtcggcggtggcgccggcgatgacgtacggacagagccaagaggtggcggctccgctcatgtggaatttcgatgacatcacggccatgccaatgtgattgtcttaccgtggagattaaggcatttaaaggcttatagataacataaatttgccatgtatgatcaatggttaattcctattgctcaagggcttatattaagggttacctacacggcatggctagcttagcctacaatttatgtttcttgcatttctttctctttttttgagatgagctagtgtgttatactatttgttcatcttttctggtagtggtggatacattttcgccggctagggttggaatttgtaaatagaagatggtcaataataagattgtttctggct

SEQ ID NO: 184 - protein, 243 aa, Oryza sativa
MCGGAIPLISSRGPGGKRSLSAADELWPPPPQHASDDPAEQAAADEEEQEQQPAARRQRRGERRTLYRGIRRRPWGKWAAEIRDPAKGARVWLGTFATAEAAARAYDRAARRIRGTKAKVNFPNEDNAFAAAPPPYHLAAYYGDASSTSYLYPMAMTPAAAGLREQQLMTTTAVEYSVNDAVDVASVYFQPPPPAVAYEFSAVGGGAVVVPVSAVAPAMTYGQSQEVAAPLMWNFDDITAMPM

SEQ ID NO: 185 - DNA, 1260 bp, Oryza sativa
gtctcaaacccaatcaaactccaaccaaactcacctacctacccccaacccatccagagctagagctatgtgcggcggcgcgatcctcgccgacctcataccgtcgccgcgctccggcggccacaccaaaaagaacaagcggcggcggatcagcgacgacgaggacttcgaggccgccttcgaggagttcgacgccggcgacgacgactccgactccgactccgagtccgaggaggtagacgagtacgacgtcgtcgtcgacgacgacgacagcgaggacggcgtggtggttcttccgccgccgccgccgccgccgccggtgattccacatgagcgccatggcgcgaggcggttccgcggcgtgaggaagcggccgtgggggaagtgggcggcggagatccgcgaccccgtgcgcggcgtgcgcgtctggctcggtaccttccccaccgccgagtccgccgcgcgcgcctacgacgccgccgcccgccgcctccgcggcgccaaggccaagcccaacttcccctccgcgccgccgccctcggctgctgctcaccgccgcaagaagcgccgcgcccacgccgccacgcgctcgccgtcgtctccgcccgccaccagcgaggtcacggcggcgtccgcgtccgcgtccagcgatgtccccgcgccggcgttcgcttccttcgtcggcgagcccgggcacggcggcgccaagtcgatgccgacgacgagccacacctcgcagccagccccgccggcgacggtggcgtccgagaacgtcgacgacccggaggtgttcgacccgtacgacgtccacggcggcctcgcctcctacttcgccggcggcgcgtacgagtccctggagagcctgttcgcgcacggcggcgacagcgccgccgtcgaccaagcggcgagcgaccactggccggcggcgctatggagcttcgcagacgacggctcgttctgcttctgatgctgtcaaatcacatcgccattggcggccattgcaagccatggcatggcacctgatgatgctgatccagtgaactggtcactcgttcttgatgcgttttcagtttcttgtacagtgtttttccccagcaacagtgaagtagtattcagttattcactgttcagtcatgagttcatcgcaaaatatgatgtaagtatgtgtcttgagattgttttagcagtggcttttgtttgtataatgtatttctctgtaattaattaatagctgttttcagtgataaactaaattttctg

SEQ ID NO: 186 - protein, 322 aa, Oryza sativa
MSQTQSNSNQTHLPTPNPSRARAMCGGAILADLIPSPRSGGHTKKNKRRRISDDEDFEAAFEEFDAGDDDSDSDSESEEVDEYDVVVDDDDSEDGVVVLPPPPPPPPVIPHERHGARRFRGVRKRPWGKWAAEIRDPVRGVRVWLGTFPTAESAARAYDAAARRLRGAKAKPNFPSAPPPSAAAHRRKKRRAHAATRSPSSPPATSEVTAASASASSDVPAPAFASFVGEPGHGGAKSMPTTSHTSQPAPPATVASENVDDPEVFDPYDVHGGLASYFAGGAYESLESLFAHGGDSAAVDQAASDHWPAALWSFADDGSFCF

SEQ ID NO: 187 - DNA, 699 bp, Oryza sativa
atgcgccgccgcgtctcctcctcctcctcctcctcctcgtcctcgtcgccggcgaggcatcacaaggcgcggcgcagcaggaggaagctcgccgtcgacgaggactgggaggccgccttccgcgagttcctctcccgcgaccacgacgacgacgacgacgaccacgacggtcagcatgtcgttgttgcgccgttgatccgtggtagtgacaagtgcgtccacggccacgaggtggtggcgtcgacggtcggcggtggcgcaagcggcggacgacgacgagccgacgacgacgacggcgagcggcggcggcggcggcggagggagaagcggagctacccgtaccgcggcatccggcagcggccgtgggggaggtgggcgtcggagatccgcgaccccgtcaagggcatccgcgtctggctcggcaccttcgacaccgccgagggcgccgcgcgcgcctacgacgacgaggttcgccgcatctacggcggcaacgccaagaccaacttccccccatcgccgcccacgccgccgccgccggagaagccagcggcggagaggagcccctcgacgacgccgacgacgaccacggaggactccggcgactcgcgcatactcatcgagtgctgctccgacgacctgatggacagcctcctcgccgccttcgacatgaccaccggcgacatgcgcttctggagctaa

SEQ ID NO: 188 - protein, 232 aa, Oryza sativa
MRRRVSSSSSSSSSSSPARHHKARRSRRKLAVDEDWEAAFREFLSRDHDDDDDDHDGQHVVVAPLIRGSDKCVHGHEVVASTVGGGASGGRRRADDDDGERRRRRRREKRSYPYRGIRQRPWGRWASEIRDPVKGIRVWLGTFDTAEGAARAYDDEVRRIYGGNAKTNFPPSPPTPPPPEKPAAERSPSTTPTTTTEDSGDSRILIECCSDDLMDSLLAAFDMTTGDMRFWS

SEQ ID NO: 189 - DNA, 1391 bp, Lycopersicon esculentum
ttcaaattgagctttttctccattaaaattctctctgcaaatttatagtttttcttttttcactttttgagaagaaatcaaaagctatgtgtggtggtgcaattatctccgatttggtacctcctagccggatttctcgccggttaaccgctgattttctatggggtacatccgatctgaacaagaagaagaagaaccctagtaattaccactcaaagcccttgaggtctaagtttattgaccttgaagatgaatttgaagctgactttcagcacttcaaggataattctgatgatgatgatgatgtgaaggcatttggccccaaatccgtgagatctggtgattcaaactgcgaagctgacagatcctccaagagaaagaggaagaatcagtaccgggggatcagacagcgtccttggggtaagtgggcagctgaaatacgtgatccaaggaaaggtattcgagtctggcttggtactttcaattcagccgaagaggcagccagagcttatgatgctgaggcgcgaaggatcagaggcaagaaagctaaggtgaactttcctgatgaagctccagtgtctgtttcaagacgtgctattaagcaaaatccccaaaaggcacttcgtgaggaaaccctgaacacagttcagcccaacatgacttatattagtaacttggatggtggatctgatgattcgttcagttttttcgaagagaaaccagcaaccaagcagtacggcttcgagaatgtgtcttttactgctgtagatatgggactgggctcagtttccccttcagctggtacaaatgtttacttcagctctgatgaagcaagtaacacttttgactgctctgatttcggttgggctgaaccgtgtgcaaggactccagagatctcatctgttctgtcggaagttctggaaaccaatgagactcattttgatgatgattccagaccagagaaaaaactgaagtcctgttccagcacttcattgacagttgacggtaacactgtgaacacgctatctgaagagctatcggcttttgaatcccagatgaagttcttgcagatcccatatctcgagggaaattgggatgcatcggttgatgccttcctcaatacaagtgcaattcaggatggtggaaacgccatggacctttggtccttcgatgatgtaccttctttaatgggaggtgcctactaagctgcatacacatcttcccctgctaagttttgtaaataacgcttcatttgagtgaagtttgcgcctgcgtttacgtttatcaccaaactaaaagactatatatgtgttgtattaatttattcaaaatttactcgtttgatatatgtaagtatgtatccttgttttcataaaaaaaaaaaaaaaaaa

SEQ ID NO: 190 - protein, 372 aa, Lycopersicon esculentum
MCGGAIISDLVPPSRISRRLTADFLWGTSDLNKKKKNPSNYHSKPLRSKFIDLEDEFEADFQHFKDNSDDDDDVKAFGPKSVRSGDSNCEADRSSKRKRKNQYRGIRQRPWGKWAAEIRDPRKGIRVWLGTFNSAEEAARAYDAEARRIRGKKAKVNFPDEAPVSVSRRAIKQNPQKALREETLNTVQPNMTYISNLDGGSDDSFSFFEEKPATKQYGFENVSFTAVDMGLGSVSPSAGTNVYFSSDEASNTFDCSDFGWAEPCARTPEISSVLSEVLETNETHFDDDSRPEKKLKSCSSTSLTVDGNTVNTLSEELSAFESQMKFLQIPYLEGNWDASVDAFLNTSAIQDGGNAMDLWSFDDVPSLMGGAY

SEQ ID NO: 191 - DNA, 1107 bp, Oryza sativa
agatattcagacacacaccttcaataacttgcaaggataactcaaactacttgaatcagatcagacaaaaacatcataagaatatcacgatgtgtggaggagcactgatcccgaacgactatggcgacaagccgccgccgccgccgtcggagtcgtcggagtgggacgccacaacgaagatgaagaagaagaagaagcgtggtggcggcggcgacgacgactgggaggccgccttccgggagttcatcgctggcgacgacgacgacgacgacggcggcgtttccatgttcccttctggtgcagggacgatggagacgaccacagaggtggcgccggcggcggcggtggtggagaggccgcggcggcggcgaagggtgaggcggagctacccgtaccgcggcgtccggcagcggccgtgggggcggtgggcgtcggagatccgcgaccccgtcaagggcgcccgcgtctggctcggcaccttcgacaccgccgtcgaggccgcgcgcgcctacgacgccgaggcgcgccgcatccacggccacaaggcaaggaccaacttcccgcccgacgagcctccgctgccggcgccatcgcaggcgccgttctgcttcctgctcgacgacgacgacgacgacgacggcgtggcccgtggaaacagcccggcgtcgtcgtcggcgccggacagagcctccgcttgcacgacgtcgtcgacggtggcgtccggcgagcgaggcgatgagctcatactgctggagtgctgctccgacgacgtgatggacagcctcctcgccggcttcgacgtgtccagcgaaccacgcagtgttttgggaatggttaattagcagcgcgcacgcctgattagatcggtacatgtgaagtacaagagaagtagttactactagctaggagcaaattaacttggagtgcaagaataaaatatgcatgtctctgcactactactgtagtgttagcaagtttgctcattgttctgttgtatcctttcatgtccatttcagacttcccaatgctacataaggatgtacatatgtatgatgttgtgtgccttgttaatcaatgaatgtaaatatctttatattgcttttgtac

SEQ ID NO: 192 - protein, 250 aa, Oryza sativa
MCGGALIPNDYGDKPPPPPSESSEWDATTKMKKKKKRGGGGDDDWEAAFREFIAGDDDDDDGGVSMFPSGAGTMETTTEVAPAAAVVERPRRRRRVRRSYPYRGVRQRPWGRWASEIRDPVKGARVWLGTFDTAVEAARAYDAEARRIHGHKARTNFPPDEPPLPAPSQAPFCFLLDDDDDDDGVARGNSPASSSAPDRASACTTSSTVASGERGDELILLECCSDDVMDSLLAGFDVSSEPRSVLGMVN

SEQ ID NO: 193 - DNA, 1552 bp, Lycopersicon esculentum
gacaattatacattttccgtcaaaacataaatcatgtgtggtggttctataatctccgattacatagaccctagccggacttctcgccggctcaccgccgagtttctatggggtcgtttcgatctcggtaagaagcaaaaaaatcccaacaattatcactctaaagctaagcatttgcgatctgaagttgttgacgactttgaagccgattttcaggacttcaaagagttatccgatgatgaggatgttcaagtcgatgtcaagccatttgccttctctgcttccaaacactctactggttccaaatctttgaaaactgttgattcagacaaggatgctgctgctgataaatcctctaagagaaagaggaagaatcaatatagagggatcagacagagaccttggggtaagtgggcagctgaaatacgtgacccaaggaaaggggttcgggtctggctgggaaccttcaatactgcagaagaagctgccaaagcttatgatattgaggcgaggaggatcagaggcaagaaggctaaggtaaactttcctgatgaagctcccgcccctgcatcaagacacactgttaaggtgaatcctcagaaggtccttcctgaggagagcctgtattcacttcagtccgactcagcaatcatgaacagcgtggaggatgaccattatgattcttttggattttttgaagagaaacccatgacaaaacagtatggatatgagaatgggagcagtgcttctgcagatacgggatttggttcgttcgtcccttcagctggcggtgatatctacttcaactctgatgtaggaagcaactcttttgaatgctctgattttggttggggagagccatgctccaggactccagagatatcatctgttctgtcagctgctattgaatgtaatgaagctcaatttgttgaagatgccaattctcagaaaaagttgaaatcatgcaccaacaaccccgtagctgatgatggaaacccccgttactatggtacctgaagagcttccagcttttgaacctcagatgaatttctttcatctcccatatatggagggaaattgggatgcatcaggtggtaacttcctcaacacaagtgcaactcaaaatggtggtgaaaatgctatggacctgtggtcctttgatgatgttccttctttaatgggaggtatcttttaagtcaacatgccttgagttttgtaaataaggcttcatgtgagtgattttttgctgttgtataatgtacttagtgcaaatatttgatatgttaatttgatctccgttaacttgttcttttaggtgtgtctggtggtggaagaagaatgatccacagagaaccatgattaagccatggataatgcactaagtagagcagtgcataggtaattaggtttaattaactactagtagagatgttaaattcgagttttacttaaaaacaattgggctgtatggattatgagaattgatgagacctcgatgcttgctataacgttacctttttagtgttgctttcacaaaaaaaaaaaaaaaaaa

SEQ ID NO: 194 - protein, 327 aa, Lycopersicon esculentum
MCGGSIISDYIDPSRTSRRLTAEFLWGRFDLGKKQKNPNNYHSKAKHLRSEVVDDFEADFQDFKELSDDEDVQVDVKPFAFSASKHSTGSKSLKTVDSDKDAAADKSSKRKRKNQYRGIRQRPWGKWAAEIRDPRKGVRVWLGTFNTAEEAAKAYDIEARRIRGKKAKVNFPDEAPAPASRHTVKVNPQKVLPEESLYSLQSDSAIMNSVEDDHYDSFGFFEEKPMTKQYGYENGSSASADTGFGSFVPSAGGDIYFNSDVGSNSFECSDFGWGEPCSRTPEISSVLSAAIECNEAQFVEDANSQKKLKSCTNNPVADDGNPRYYGT

SEQ ID NO: 195 - DNA, 993 bp, Lycopersicon esculentum
tcatttctgtatcaatcaatattctttgtttctgctgttttgatgaaatcacactaagatgtgtggtggtgcaattcttgctgatatcattcctcctcgtgaccgccgtttgtcatccaccgacctatggccgactgatttctggccaatttccacccaaaatgttcctctcaaccccaaacgagctcgaccctctacaggtggtgagcagatgaagaagaggcaaaggaagaatctttacagagggataagacaacgtccatggggtaaatgggctgctgaaattcgtgacccgagaaaaggggttagggtttggttaggtactttcaacactgctgaagaagctgcaagagcttatgatagagaagctcgtaaaatcaggggtaagaaagctaaagttaatttccccaatgaagatgacgaccattactgctacagtcatccagagccccctcccttgaacattgcttgtgatactactgttacttacaatcaagaatcaaataactgttaccccttttactcaatcgagaacgttgaacctgttatggaatttgcaagttataatggaattgaagatggaggagaggagatggtgaaaaatttgaataacagggttgtagaggaagaggagaaaacagaggatgaagtgcagatactttctgatgagctgatggcttatgagtcattgatgaagttctatgaaataccgtatgttgacgggcaatcagtggcggcgacggtgaatccagcggcggagaccgccgtgggcggtggctcgatggagctttggagttttgatgatgttagtcgtctacaaccaagttataatgtagtttaattattgttttgtttaaacttttcataattttattttatcgaattaggaagaattgagtttttataatttaatcaattgtgtaaaactatgtttctaattcattaatattatattggatatgttgtttttaaaaaaaaaaaaaaaaaaaaaaa

SEQ ID NO: 196 - protein, 260 aa, Lycopersicon esculentum
MCGGAILADIIPPRDRRLSSTDLWPTDFWPISTQNVPLNPKRARPSTGGEQMKKRQRKNLYRGIRQRPWGKWAAEIRDPRKGVRVWLGTFNTAEEAARAYDREARKIRGKKAKVNFPNEDDDHYCYSHPEPPPLNIACDTTVTYNQESNNCYPFYSIENVEPVMEFASYNGIEDGGEEMVKNLNNRVVEEEEKTEDEVQILSDELMAYESLMKFYEIPYVDGQSVAATVNPAAETAVGGGSMELWSFDDVSRLQPSYNVV

SEQ ID NO: 197 - DNA, 771 bp, Arabidopsis thaliana
atggaaaacagctacaccgttgatggtcaccgtcttcaatattccgttccgttaagctccatgcatgaaaccagtcaaaactccgaaacttacggattatccaaagagtcgccgttggtctgcatgcccttgttcgaaaccaacactacttcattcgatatctcttctcttttctcgtttaacccaaaaccagaacccgaaaacacgcatcgtgtcatggacgattccatcgccgccgtcgtgggcgaaaacgttcttttcggtgataaaaacaaagtctctgatcacttgaccaaagaaggtggtgtgaagcgggggcggaagatgccgcagaagaccggaggattcatgggagtgagaaaacggccgtgggggagatggtcggcggagataagagacaggatagggcggtgcagacactggttaggaacgttcgacacggcggaagaggcagcgcgtgcgtatgacgcggcggcgaggaggcttagagggaccaaagccaagaccaatttcgtgattcctccgctttttcccaaggaaatagctcaggctcaggaggataataggatgaggcagaagcagaagaagaagaagaagaaaaaagtgagtgtgaggaagtgtgttaaagtcacatcggttgcacagttgttcgatgatgccaattttataaattcttctagtattaaaggaaatgtgattagttctattgataatcttgaaaaaatgggtctagagcttgatttgagtttagggttgttgtctaggaagtga

SEQ ID NO: 198 - protein, 256 aa, Arabidopsis thaliana
MENSYTVDGHRLQYSVPLSSMHETSQNSETYGLSKESPLVCMPLFETNTTSFDISSLFSFNPKPEPENTHRVMDDSIAAVVGENVLFGDKNKVSDHLTKEGGVKRGRKMPQKTGGFMGVRKRPWGRWSAEIRDRIGRCRHWLGTFDTAEEAARAYDAAARRLRGTKAKTNFVIPPLFPKEIAQAQEDNRMRQKQKKKKKKKVSVRKCVKVTSVAQLFDDANFINSSSIKGNVISSIDNLEKMGLELDLSLGLLSRK

SEQ ID NO: 199 - DNA, 1413 bp, Nicotiana tabacum
gaattcggcacgagaaaaaagaaagaagtttactccgtcaaaaacgaaactgatttctgcataaaacttttctgctgagagaaaacaaaaagcatgtgtggtggtgctataatctccgattacattgccccgagccgaacttctcgccggctcaccgccgagttgctatggggccggtccgatctgagtaataagcaaaaaaatcctaacaattatcactccaagccgttgagatcccaagtagttgacctagacgatgacttcgaggctgattttcaggactttaaagatttctccgatgacgaggatgttcaagtcgatgtcaagccatttgccttctctgcttcgaaaaactctaatgttgaaggctccaaatctgtgaaaactgatgattcagacaaggatgctgatagatcctctaagagaaagaggaagaatcagtatagggggatcagacagcgaccttggggtaagtgggcagctgaaatacgtgacccaagaaaaggggttcgggtgtggctgggaactttcaatactgcagaagaagctgccagagcttatgatgttgaggctaggaggatcagaggcaataaagctaaggtaaactttcccgatgaagctccagtgcctgcctcgagacgtactgttaaggtgaatcctcaaaaggtccttcctaaggagatcctggactcggttcagcccgactcgactatcataaacaacatggaggattgctgttatgattctttgggatttcttgaagagaaacccatgacgaagcagtttggatgtgaggatgggagcagtgcttctggagatacgggatttggctcatttgccccttcagctggtaccgatatctacttcaactctgatgttggaagtaactcttttgactgctctgattttggttggggagagccatgtgccaggactccagagatatcatccgttctgtcagctgttattgaaagcaatgaatctcaacttgttgaagatgataccagtccaatgaaaaaactgaaatcaagccccattaatccagtagctgatgatggaaataccgcaaacaagctatctgaagagctttcagcttttgaaacccagatgaagttccttcagatcccctatctggagggaaattgggatgcatcagttgatactttcctcaactcaagtgcaactcaggatggtgataatgctatggacttatggtcctttgatgatgttccttctttattgggaggtgtcttttaagtcagcatgccttgtctagtttttgtaaataaggcttcatgtgagtgaactttgctattgttttgcctcaaagaaaggctctttattatgtacagaagctttttgaaatggtaaatagtttaatctctgtttaaaaaaaaaaaaaaaaaaaaaaaa

SEQ ID NO: 200 - protein, 387 aa, Nicotiana tabacum
MCGGAIISDYIAPSRTSRRLTAELLWGRSDLSNKQKNPNNYHSKPLRSQVVDLDDDFEADFQDFKDFSDDEDVQVDVKPFAFSASKNSNVEGSKSVKTDDSDKDADRSSKRKRKNQYRGIRQRPWGKWAAEIRDPRKGVRVWLGTFNTAEEAARAYDVEARRIRGNKAKVNFPDEAPVPASRRTVKVNPQKVLPKEILDSVQPDSTIINNMEDCCYDSLGFLEEKPMTKQFGCEDGSSASGDTGFGSFAPSAGTDIYFNSDVGSNSFDCSDFGWGEPCARTPEISSVLSAVIESNESQLVEDDTSPMKKLKSSPINPVADDGNTANKLSEELSAFETQMKFLQIPYLEGNWDASVDTFLNSSATQDGDNAMDLWSFDDVPSLLGGVF

SEQ ID NO: 201 - DNA, 1605 bp, Fagus sylvatica
caaacacactgaagaattaagtcatttgggaatcaggtttcttggaaaaacccctgccaaagccccttcaaggctctcagctttgagtccccagatgtgtggaggagctataatctccgactttatagcgccaaccgggtcgcggcggttgacggcggattatctctggggcgatcggaaaaaacccatttcaggaaagcgattctcgaagcctgtagtcgatttggacgacgaattcgagctcgattttcagggctttaaggacgaggaggagtctgatatcgacgaggaagaggtccttgtgcaagatgtcaagcccttcactttttctgctcctcctagctctggatctaagcctgtaaaatccgtggaattcaatgggcaagctgagaaatctgcaaagagaaagaggaagaatcagtatcgggggatccggcagcgcccatggggtaagtgggctgctgagattcgagacccaaggaaaggggtccgtgtctggcttggaacttttaacactgcagaaaaagctgcaagagcttatgatgcagaggcacggagaattcgtggcaagaaggctaaggtgaattttcccgatgagactccccgtgcttctccaaagcgttcagttaaggcaaatctgcagaagccacttgccaaggcaaacctgaactctgtccagcccaacctgaaccaaaatttcaattttatgaacaactctgatcaggactataccatgggtttgatggaagagaaacctttcacaaaccagtatgggtatatggattccatccctgccaatgcagatgttggactaaaaccctttgcttccaataatactaccccgtactttaactcagatcaggggagtaactcgtttgattgttctgactatggatggggagaacagggctctaagactccagaaatctcatctgttctttcagctactttagaaggggatgaatctcagtttgtggaggatgctatgcccacgaagaaattgaagtcagactctgggaatgcagtgttcattgaaaataacactgcaaagacactgtcagaggagctctcagcttttgagtcccagatgaactttcagatgccatttcttgagggaagctgggaatccaacatggaggcactgttcagtggggacacaactcaggatggtaactcgatggatctttggagcttcgatgacctccccgttatggctgggggagttctgtgaccgcaaaactattttccgcatgcttgctgttctagtttatgtataaataaggctaaatacatgttagaatggtttgtcattctgtggagatggacatgcctgtggtttcaaacaagctgaacactgaatgcttaagactctatgaagggatgtactgaagtagtgttgttctactgttgtatgagggagtacataggtccctatttaggatccctttgagagactaccttgaagacattgaattttgggattttgaatttgatgtttttgtattgatgattatgtgtgatgaaacctctgtcataaaaatactaaactaaaaacctgatgtatgtcaactgtgtttagtgtttgtttcaaaaaaaaaaaaaaaa

SEQ ID NO: 202 - protein, 378 aa, Fagus sylvatica
MCGGAIISDFIAPTGSRRLTADYLWGDRKKPISGKRFSKPVVDLDDEFELDFQGFKDEEESDIDEEEVLVQDVKPFTFSAPPSSGSKPVKSVEFNGQAEKSAKRKRKNQYRGIRQRPWGKWAAEIRDPRKGVRVWLGTFNTAEKAARAYDAEARRIRGKKAKVNFPDETPRASPKRSVKANLQKPLAKANLNSVQPNLNQNFNFMNNSDQDYTMGLMEEKPFTNQYGYMDSIPANADVGLKPFASNNTTPYFNSDQGSNSFDCSDYGWGEQGSKTPEISSVLSATLEGDESQFVEDAMPTKKLKSDSGNAVFIENNTAKTLSEELSAFESQMNFQMPFLEGSWESNMEALFSGDTTQDGNSMDLWSFDDLPVMAGGVL

SEQ ID NO: 203 - DNA, 1653 bp, Fagus sylvatica
caacaatattttctctcacaaaaactaaactctctgtatttcccaaactttccaaaaaaaccattttacttttcacccatccgagcaaaaaaaacaaagagaaaaaagaaacccctccaaaaaagccaagaccgccatgtgtggaggagctataatctccgactttatagcgccaaccgggtcgcggcggttgacggcggattatctctggggcgatcggaaaaaacccatttcaggaaagcgattctcgaagcctgtagtcgatttggacgacgaattcgagctcgattttcagggcttcaaggacgaggaggagtctgatatcgacgaggaagaggtccttgtgcaagatgtcaagcccttcactttttctgctcctcctagctctggatctaagcctgtaaaatccgtggaattcaatgggcaagctgagaaatctgcaaagagaaagaggaagaatcagtatcgggggatccggcagcgcccatggggtaagtgggctgctgagattcgagacccaaggaaaggggtccgtgtctggctcggaacttttaacactgcagaagaagctgcaagagcttatgatgcagaagcacggagaattcgtggcaagaaaagcaaagggaattttccgatgagacttcccgtgccaaagcgttcagttaaggcaaatctgcagaagccacttgccaaggcaaacctgaactctgtccagcccaacctgaaccaaaatttcaattttatgaactctgatcaggactataccatgggtttgatggaagagaaacctttcacgaaccagtatgggtatatggattccatccctgtcaatgcagatgttggactaaaatcctttgcttccaataatactgccccatactttaactcagatcaggggagtaactcgtttgattgttctgactatggatggggagaacagggctctaagactccagaaatctcatctgttctttcagccactttagaaggggatgaatctcagtttgtggaggatgctgtgcccacgaagaaattgaagtcagactctgggaatgcagtgttcattgaaaataacactgcaaagacactgtcagaggagctctcagcttttgagtcccagatgaactttcagatgccatttcttgagggaagctgggaatccaacatggaggcactgttcagtggggacacaactcaggatggtaactcgatggatctttggagcttcgatgacctccccgttatggctgggggagttctgtgagcaaactattcccatgcttgctagtttatgtaaataaggctacatgttagaatggtttgtcatctgtgatggacatgccgtttcaaacaagctgtgaacatgcttaagactcttatgaaggatgtactgaagtagtctactgttgtatgaggagtacataggtatttaggatccctttctcccttgaagacattgaatttgggattttgaatttgatctttgtattgatgattatgtgtgatctgtcataaaaatactaaaaacctgatgtatgtcaactttagtgtttgtttctatcttggttcttttacaaaaagggccttcaatttttgtactgtttatttgtttttattggtttttgattttacctaaaaaaaaaaaaaaaaaaa

SEQ ID NO: 204 - protein, 375 aa, Fagus sylvatica
MCGGAIISDFIAPTGSRRLTADYLWGDRKKPISGKRFSKPVVDLDDEFELDFQGFKDEEESDIDEEEVLVQDVKPFTFSAPPSSGSKPVKSVEFNGQAEKSAKRKRKNQYRGIRQRPWGKWAAEIRDPRKGVRVWLGTFNTAEEAARAYDAEARRIRGKKSKGNFPMRLPVPKRSVKANLQKPLAKANLNSVQPNLNQNFNFMNSDQDYTMGLMEEKPFTNQYGYMDSIPVNADVGLKSFASNNTAPYFNSDQGSNSFDCSDYGWGEQGSKTPEISSVLSATLEGDESQFVEDAVPTKKLKSDSGNAVFIENNTAKTLSEELSAFESQMNFQMPFLEGSWESNMEALFSGDTTQDGNSMDLWSFDDLPVMAGGVL

SEQ ID NO: 205 - DNA, 1379 bp, Capsicum annuum
acgcggggaaattaaactttctccattgaaattcactgcgaaaaaaaaaccctttcccagttataatacactacttaaattattagagaaaagaaaaagctatgtgtggtggtgcaattatctccgatttggtacctcctagccggatttcccgccggctaaccgccgagttgctatggggtaactctgatctgagcaaaaagaagaaaaatccagggaattattactcaaagcctttgaacaggtctaagtttattgaccttgatgaggaatttgaagctgactttcaggacttcaaggactatgccgatgacgatgttgatgatgttaagcccttcggttccaaatctgtgaaatctggcgattcaagctgcgatactgaaaaatcttccaagagaaagaggaagaatcagtaccgggggatcagacagcgtccttggggtaagtgggcagctgaaattcgtgatccgaggaaagggattcgagtttggcttggaactttcaattctgcggaagaagcagctagagcttatgatgttgaggcacgaaggatcagaggcaagaaggctaaggtgaactttcctgatggatctccagcttctgcttcaagacgtgctgttaagccaaatcctcaggaggcacttcgcgaggaaatcttgaacacagttcagccgaacacaacttatatcaacaacttggacggcggatctgatgattcgtttggctttttcgaagagaaaccagcagcaaagcagtatggctatgagaatgtttcttttactgctggagatatgggactgggttcaatttccccttcaactggtacaacaaatgtttacttcagttctgatgaaggaagcaacacctttgactgctctgatttcggttggggtgaaccatgtccgaggactccagagatctcatctgttctgtcagaagttctagaatgtaatggtactcaatctgatgaagatgctagaccagagaaaaaactgaagtcgtgttccaacgcttccttgccagatgaggataacactgtgcacacgctatctgaagagctatcggcttttgaatcccagatgaagttcttgcagatcccatatcttgagggaaattgggatgcatcagttgatgcctttgtcaacacaggcgcaattcaggatggcggaaatgcgatggatctctggaccttcgatgatgttccttctttaatgggaggtgtctactaagccaacacgcaccttcccttactaagttttgtaaataaagcttcatttgagtgaagtttgcagttatgttgtctccaaacaaaaaagactatatatgtgttgtattaaatttatttcataaatttacttgtttgatacaaaaaaaaaaaa

SEQ ID NO: 206 - protein, 375 aa, Capsicum annuum
MCGGAIISDLVPPSRISRRLTAELLWGNSDLSKKKKNPGNYYSKPLNRSKFIDLDEEFEADFQDFKDYADDDVDDVKPFGSKSVKSGDSSCDTEKSSKRKRKNQYRGIRQRPWGKWAAEIRDPRKGIRVWLGTFNSAEEAARAYDVEARRIRGKKAKVNFPDGSPASASRRAVKPNPQEALREEILNTVQPNTTYINNLDGGSDDSFGFFEEKPAAKQYGYENVSFTAGDMGLGSISPSTGTTNVYFSSDEGSNTFDCSDFGWGEPCPRTPEISSVLSEVLECNGTQSDEDARPEKKLKSCSNASLPDEDNTVHTLSEELSAFESQMKFLQIPYLEGNWDASVDAFVNTGAIQDGGNAMDLWTFDDVPSLMGGVY

SEQ ID NO: 207 - DNA, 1329 bp, Capsicum annuum
agttataatacactacttaaattattagagaaaagaaaaagctatgtgtggtggtgcaattatctccgatttggtacctcctagccggatttcccgccggctaaccgccgagttgctatggggtaactctgatctgagcaaaaagaagaaaaatccagggaattattactcaaagcctttgaacaggtctaagtttattgaccttgatgaggaatttgaagctgactttcaggacttcaaggactatgccgatgacgatgttgatgatgttaagcccttcggttccaaatctgtgaaatctggcgattcaagctgcgatactgaaaaatcttccaagagaaagaggaagaatcagtaccgggggatcagacagcgtccttggggtaagtgggcagctgaaattcgtgatccgaggaaagggattcgagtttggcttggaactttcaattctgcggaagaagcagctagagcttatgatgttgaggcacgaaggatcagaggcaagaaggctaaggtgaactttcctgatggatctccagcttctgcttcaagacgtgctgttaagccaaatcctcaggaggcacttcgcgaggaaatcttgaacacagttcagccgaacacaacttatatcaacaacttggacggcggatctgatgattcgtttggctttttcgaagagaaaccagcagcaaagcagtatggctatgagaatgtttcttttactgctggagatatgggactgggttcaatttccccttcaactggtacaacaaatgtttacttcagttctgatgaaggaagcaacacctttgactgctctgatttcggttggggtgaaccatgtccgaggactccagagatctcatctgttctgtcagaagttctagaatgtaatggtactcaatctgatgaagatgctagaccagagaaaaaactgaagtcgtgttccaacgcttccttgccagatgaggataacactgtgcacacgctatctgaagagctatcggcttttgaatcccagatgaagttcttgcagatcccatatcttgagggaaattgggatgcatcagttgatgcctttgtcaacacaggcgcaattcaggatggcggaaatgcgatggatctctggccttcgatgatgttccttctttaatgggaggtgtctataagccaacacgcaccttcccttattaagttttgtaaataaagcttcatttgagtgaagtttgcagttatgttgtctccaaacaaaaaagactatatatgtgttgtattaaatttatttcataaatttacttgtttgatgtaaaaaaaaaaaaaaaaaaaaaa

SEQ ID NO: 208 - protein, 369 aa, Capsicum annuum
MCGGAIISDLVPPSRISRRLTAELLWGNSDLSKKKKNPGNYYSKPLNRSKFIDLDEEFEADFQDFKDYADDDVDDVKPFGSKSVKSGDSSCDTEKSSKRKRKNQYRGIRQRPWGKWAAEIRDPRKGIRVWLGTFNSAEEAARAYDVEARRIRGKKAKVNFPDGSPASASRRAVKPNPQEALREEILNTVQPNTTYINNLDGGSDDSFGFFEEKPAAKQYGYENVSFTAGDMGLGSISPSTGTTNVYFSSDEGSNTFDCSDFGWGEPCPRTPEISSVLSEVLECNGTQSDEDARPEKKLKSCSNASLPDEDNTVHTLSEELSAFESQMKFLQIPYLEGNWDASVDAFVNTGAIQDGGNAMDLWPSMMFLL

SEQ ID NO: 209 - DNA, 1032 bp, Capsicum annuum
attctcaaaaataatttttcatttctgattcaatcttgttgtttctttcattttgaaaaaaaaaagaagaagaagaagagtactttaactacactgcaaaatgtgtggtggagcaattcttgctgatatcattcctcgtcgtgaccgtcgtctgtcatccacagacttatggtcaatttgttctgatgatttctggccaaattcttcattttccaagccattttccacccaaaatgtttcccctgcaaagcccaaacgaactcaaccctctgcaggtaatgagcaaatccagaaagccaagaaaaggcaaaggaagaatctatacaggggaatccgccagcgtccatggggtaaatgggcagctgaaattcgtgacccaagaaaaggggtcagagtctggttaggtactttcaacactgctgaagaagctgctagagcttatgacaaagaagctcgtaaaatccggggagagaaagctaaagttaatttcccaaatgaagatgatcactacagttatccagagcctcctcctctcgctgcttacaataatactactttttataataattgctatgcgttcgagaacaatgaacccgttatcgaatatgcaatagctaacaacaatgatcaaaatgggctgattaaagaggtggaaaatatgaatggaagggtcgtggaggaggaggaaaaaacagagattcaagtgcagaaactctctgaggaactgatggcttatgagtcattgatgaagttttatgagatcccttatgttgatgggcaatcagtggcggcgatggcgaatccagcggcggaggctgtcttgggtggtggcttgatggagctttggagttttgatgatgttagtcgtcaacaacctagttataatgtagtttgattattgtttgtttacattgttgtatgtttttatttttcggtttaggagaatgggtttccttgtaattctcaatgtttaagcaattggtaaaactattgtctctaaaaaaaaaaaaaaaaaaaaaaaaaaaaaaaaaa

SEQ ID NO: 210 - protein, 264 aa, Capsicum annuum
MCGGAILADIIPRRDRRLSSTDLWSICSDDFWPNSSFSKPFSTQNVSPAKPKRTQPSAGNEQIQKAKKRQRKNLYRGIRQRPWGKWAAEIRDPRKGVRVWLGTFNTAEEAARAYDKEARKIRGEKAKVNFPNEDDHYSYPEPPPLAAYNNTTFYNNCYAFENNEPVIEYAIANNNDQNGLIKEVENMNGRVVEEEEKTEIQVQKLSEELMAYESLMKFYEIPYVDGQSVAAMANPAAEAVLGGGLMELWSFDDVSRQQPSYNVV

SEQ ID NO: 211 - DNA, 1597 bp, Gossypium hirsutum
aaaaaaccaacccatttatttcactacccaacaacccaaaagataaaaggaatcgtttacttgttcgtagcaatttatcgtcatttcaagctcaattctctgaaaatttttgtgctgaacttcttttttctctttgtaccaccatgtgtggaggtgctattatctccgatttcataccgccgtcgcggtcgcgacgattgacggccgatttcttgtggcccgatctgaaaaaatccgggttgaagaaggggtcgggtaagagatactcgaagcccgtgatcgacttgggcgatgatttcgagactgactttcaggagttcaaagatgaagaatctgatatagatgattatgatgttgatgatgttttggctgatgtaaagccctttgcttttaacgctacaaagaaacctgcttctgctgtctctcatggttcgaactctgaaaaatccatgcaattcaatggtcaagctgagaaatgtgcgaaaagaaagaggaagaaccagtatcgtggaatccggcagcgcccatggggtaaatgggctgctgagatccgtgacccaaggaaaggggttagggtctggttaggaactttcaatactgctgaagaagctgcgagagcttatgatgctgaggcacggagaattcgtggtaagaaagctaaggtgaacttccctaacgagactccgcgtacctctccaaagcatgcagtcaagacaaattctcagaaaccactttccaagtcaaattcgagccctgttcagccaaatctcaaccagaattacaattacttgaaccagcctgagcaggaatactttgataccatgggtttcgtagaagagaagccatcggtcaatcagttcgcatacgtggaccctgttcctacgtctatagatgctggatttaatcaatcagataatgcccccttgtacttcaattcagaccagggaagtaactcgatcaattgttccgactatggctggggagaacagggtgccaaaactcctgaaatatcatccattctggaagcttctgtagagggtgatgagtttcttgaggatgctaaccctagcaagaagctgaaaccaagttccgacaatgttatgcctgccgaagacaactccgcgaagaccttgtcggacgagctgttggctttggacaaccagatgaaatacttccaaatgccgccatttattgaaggaaactgggacgccactattgatgctttcctcaatggagatgcaacacaggatggtggaaacccgatggatctttggaactttgatgatttccctaccatggcggagggtgttttctgagcgaactttccataataactagtgtttgtaaataaagcaacatgaatttggtcaaaatctgttgtgaagttgaagtaaaaaccaagctatatgcatgcttaagccttgcctgcactgctttcagaggtttttagtatgtaccccttttttatgtgtttttttgtagactttggactaaattttaaatttgagtgactgtataagtaactgtgtctgaatttgtctatgtttgaatactgaaaaacatatgaatgttttaaacccaaaaaaaaaaaaaaaaa

SEQ ID NO: 212 - protein, 390 aa, Gossypium hirsutum
MCGGAIISDFIPPSRSRRLTADFLWPDLKKSGLKKGSGKRYSKPVIDLGDDFETDFQEFKDEESDIDDYDVDDVLADVKPFAFNATKKPASAVSHGSNSEKSMQFNGQAEKCAKRKRKNQYRGIRQRPWGKWAAEIRDPRKGVRVWLGTFNTAEEAARAYDAEARRIRGKKAKVNFPNETPRTSPKHAVKTNSQKPLSKSNSSPVQPNLNQNYNYLNQPEQEYFDTMGFVEEKPSVNQFAYVDPVPTSIDAGFNQSDNAPLYFNSDQGSNSINCSDYGWGEQGAKTPEISSILEASVEGDEFLEDANPSKKLKPSSDNVMPAEDNSAKTLSDELLALDNQMKYFQMPPFIEGNWDATIDAFLNGDATQDGGNPMDLWNFDDFPTMAEGVF

SEQ ID NO: 213 - DNA, 1403 bp, Gossypium barbadense
ttgagaatcgatgcccggattaataatttctgggatgtagtcactaaaaaggcctttctcatgattttcttgcagttaaaggtcttaaattatatttccttgtgacagttatgttgtgatttgtagtttttcatggatgagtaatgtttatttatggttcatgtatccgtacgatattaaatttttctttttgtgctctatcattgaaggttcgaactctgaaaagtccatgcagttcgatggtcaagctgagaaatgtgcgaaaagaaagaggaagaaccagtatcgtggaatccggcagcgcccatggggtaaatgggctgctgagatccgtgacccaaggaaaggggttagggtctggttaggaactttcaatactgctgaagaagctgcgagagcttatgatgctgaggcacggagaattcgtggtaagaaagctaaggtgaacttccctaacgagactccgcgtacctctccaaagcatgcagtcaagacaaattctcagaaaccactttccaagtcgaatttgagccctgttcagctaaatctcgaccagaattacaattacttgagccagcctgagcaggaatacttcgataccatgggtttcgtagaagagaagccactggtcaatcagtttgcatatgtggaccctgttcctacgtctatagatgctggatctaatcaatcagataatgcccccttgtacttcaattcggaccagggaagtaactccatcaattgttccgactatggctggggagaacagggtgccagaactcctgaaatatcatccattcttgaagcttctgtagtgggtgaagagtttcttgaggatgctaaccctagcaagaagctgaaaccaagttctgacaatgttatgcctgccgaagacaactccgcgaagaccttgtcggacgagctgttggctttggacaaccagatgaaatacttccaaatgccgccatttattgaaggaaactgggacgccactattgatgctttcctcaatggagatgcaacacaggatggtggaaacccgatggatctttggaactttgatgatttccctaccatggcggagggtgttttctgagcgaactttccataataactagtgtttgtaaataaagcaacatgaatttggtcaaaatctgttgtgaagttgaagtaaaaaccaagctatatgcatgcttaagccttgcctgcactgctttcagaggtttttagtatgtaccccttttttatgtgtttttttgtagactttggactaaattttaaatttgagtgactgtataagtaattgtgtctgaatttgtttatgtttgaatactgaaaaacatatgaatgttttaaactctgctatttgtttctcccaaaaaaaaaaaaaaaaaaaaaaaaaa

SEQ ID NO: 214 - protein, 319 aa, Gossypium barbadense
MSNVYLWFMYPYDIKFFFLCSIIEGSNSEKSMQFDGQAEKCAKRKRKNQYRGIRQRPWGKWAAEIRDPRKGVRVWLGTFNTAEEAARAYDAEARRIRGKKAKVNFPNETPRTSPKHAVKTNSQKPLSKSNLSPVQLNLDQNYNYLSQPEQEYFDTMGFVEEKPLVNQFAYVDPVPTSIDAGSNQSDNAPLYFNSDQGSNSINCSDYGWGEQGARTPEISSILEASVVGEEFLEDANPSKKLKPSSDNVMPAEDNSAKTLSDELLALDNQMKYFQMPPFIEGNWDATIDAFLNGDATQDGGNPMDLWNFDDFPTMAEGVF

SEQ ID NO: 215 - DNA, 1538 bp, Gossypium hirsutum
cggcacgaggagagagagagaactagtctcgtgccgggaaaatttacaattaaaaaaattaattttgccctctaaatttctctaaaaaatctcctaaatcccatactttaaatccaattcgccatgtgtggaggtgcgattatctccgatttcattccgcctgcgcggtcgcgactggtgacggcgaattatttgtggccggatctgaaaaaatccggctctaaaaagcggtcgggtagaaagcactcgaagaagccggcggtcggctttgaagatgacttcgaggctgattttcaggtgtttaaggatgaggattctgatgtcgatgacttcaacgatgatgttgatgatgttttggctgatgttaagtcctttgctttttctgctacaaagaaaccctctcctgctgtttctcatggttcaaactccataaaatctgtggaattcagtggtcaagctgagaaatctgcaaaaagaaagaggaagaaccagtatcgcggaattcgccagcgtccgtggggtaaatgggctgctgagatccgtgatcctaggaaaggggttagggtgtggcttggaacttttaatactgctgaggaagctgcacgagcttatgatgctgaggcactgagaattcggggtaagaaagcaaaggtgaacttccctgatgagactccacgtaccactccaaagcatgctgttaaaatgaattctcagaaacctctttccgggtcaaatttgagttctgttcaatcaagtctcaacccagatttcagttactcgaacaaacttgagcagggctactatgataccgtgggtttcattgaagagaagtcactaatggatcagtttgcatatgcagaccctgttagagctgctgtagatgatgggttaaaaccctttgctgaccctgagaataccgcttcgttttttatctcagatccagggagtaacaactttgacagttccgaccttgtctggggcgaccagggtgccaagactcctgaaatatcatcctctcttgaacctactctagaggtcaacgagtttctggacaacgcaaaccctacgaagaagttgaaactgagcttgaataatgtcatgcctactggaggagacaattcggtaaagagtttatccgatgagctattagctatggacaatcaagtgaactactttcagacaccatttattgacgagaactggaatgtttcgatggatgacttccttaatggagatgcaactcaggttggcggaaacgaaatgggtttttggagctttgatgactttccttccatagatgggggtattttctgaacaaactctccttacttattatccgtttccgtacataaggcatcgtgttagcgagtttcgaccctctggcaactgcttgactattgtttctatcttgatatctctaacaccgaaaaattcaaatttaaatttcgagtgactgttagaacttacaacattgattatgtgtgatttatgatgaaaatttgaaactcctatgaatgtttaaccaaaaaaaaaaaaaa

SEQ ID NO: 216 - protein, 396 aa, Gossypium hirsutum
MCGGAIISDFIPPARSRLVTANYLWPDLKKSGSKKRSGRKHSKKPAVGFEDDFEADFQVFKDEDSDVDDFNDDVDDVLADVKSFAFSATKKPSPAVSHGSNSIKSVEFSGQAEKSAKRKRKNQYRGIRQRPWGKWAAEIRDPRKGVRVWLGTFNTAEEAARAYDAEALRIRGKKAKVNFPDETPRTTPKHAVKMNSQKPLSGSNLSSVQSSLNPDFSYSNKLEQGYYDTVGFIEEKSLMDQFAYADPVRAAVDDGLKPFADPENTASFFISDPGSNNFDSSDLVWGDQGAKTPEISSSLEPTLEVNEFLDNANPTKKLKLSLNNVMPTGGDNSVKSLSDELLAMDNQVNYFQTPFIDENWNVSMDDFLNGDATQVGGNEMGFWSFDDFPSIDGGIF

SEQ ID NO: 217 - DNA, 995 bp, Gossypium hirsutum
  misc_feature (919)..(919): n is a, c, g, or t
atgtgtggaggtgcaattatttccgatttcgtcgccgtgaaacatgacccgaaattgaccggcgatgacctttggtctgaaattgacatattctccgacctcctaggtttcgacaacaatggcaaaagctttgtcaatcatcagtttcataacaacaacaagaagctgatcaatccaaaagacaatcaacttaacaaagagagaagcgagacgattcagaagacaagccgagtcactaaaaatgttgaaaagactcagcgaactcggaaaaacttttaccgaggaataagacaaaggccatggggcaaatgggcagctgagattagagaccctcaaaaaggcgtccgagtttggctcggtacccataacacagccgaagaagcggctcgagcctacgatgaagccgccaagcgtatccgtggtgataaagccaagctcaacttccctcaaacgcccaccaaaaatcaagcagcttcaccagctcttactcagcttcctcctgctaagaaaaggtgcatcgttcccgagttaactcaaccgagcttccagactgactcaccaccttatcctatgggtcttgggtctggaagaagtgaagattataagccgattgaagtggtggagagtgagttggagttgaaagaacaaatctggagcctggaatcatttctgggtttggagactaatcatgagactatgactcaactgagtggtaacggagggactgactcactggagctttggacacttgatgacctcgtaactcagtataagcaacggcgctaacatgttcatcagtgggggcgaaaattaaataatagttagcgttaataaatgttttttgtgttaattagggtttttttatttatactatcatgcattatatatatatatagatgagaataaaggattaacgctntgctcttgcatggattagttagcgttaatcaatgttagtgtgtaattagggtttttattatgttaaaaaaaaaaaa

SEQ ID NO: 218 - protein, 261 aa, Gossypium hirsutum
MCGGAIISDFVAVKHDPKLTGDDLWSEIDIFSDLLGFDNNGKSFVNHQFHNNNKKLINPKDNQLNKERSETIQKTSRVTKNVEKTQRTRKNFYRGIRQRPWGKWAAEIRDPQKGVRVWLGTHNTAEEAARAYDEAAKRIRGDKAKLNFPQTPTKNQAASPALTQLPPAKKRCIVPELTQPSFQTDSPPYPMGLGSGRSEDYKPIEVVESELELKEQIWSLESFLGLETNHETMTQLSGNGGTDSLELWTLDDLVTQYKQRR

SEQ ID NO: 219 - DNA, 1042 bp, Gossypium hirsutum
atgtgtggaggtgcaattatttccgatttcattgccgtgaaacgcggtcggaagttaaccgccgaggatctttggtctgaacttgacacattctccgacctgttgggtctggattacggaaatggaaaagagtcttctttcactcagtccgacaacaccaaggccggttccaaagccaagaaccttgaaaaagtggcaaacgagacgactcagaagacaagccgagggagagagaaagaagggaagactcagcgaactcgaaagaacatttacagaggaatcaggcaaaggccatgggggaaatgggcggctgagataagagatcctcacaaaggtgtccgagtctggctcggtacatacaacacggctgaagaagcggctcgagcctacgatgaagccgccaagcgcatccgtggggagaaagccaagctcaacttccctcaaactccacacctaactcagcctcctgctaagaaaaggtgtatgatggctcctgagttgactccgccgagttctgaaacaaagagcccaccaaccccacaactttttatgggttttggttacgagaatggagtttacagaccgagtgaagcaatggaaagcgagatggagctgaaggagcaaatctcgagcctggagtcgttcctgggtttggagcctgatgagacaacaactgagttgagtggaagtgctgagcctgactcagtggacctttggatgcttgatgaccttgtgacacatcatcaacaacagcctcagctcttttattagaaattaaaaagttttaattagggtaatgttatgtttgatatgattatgcttaagactttaatgtttgtattaatgaagggtaaatagttgtgacaataaaaagattggccacccagttttaatttatatttatttctaatttgggtgacatgtaaattggtttcgagaaacattgaagtacccataatgttagttcatgtatcagatatagtaaacactttggattaataaaaaaacctcctaatattttatttgtaaaaaaaaaaaaaaa

SEQ ID NO: 220 - protein, 256 aa, Gossypium hirsutum
MCGGAIISDFIAVKRGRKLTAEDLWSELDTFSDLLGLDYGNGKESSFTQSDNTKAGSKAKNLEKVANETTQKTSRGREKEGKTQRTRKNIYRGIRQRPWGKWAAEIRDPHKGVRVWLGTYNTAEEAARAYDEAAKRIRGEKAKLNFPQTPHLTQPPAKKRCMMAPELTPPSSETKSPPTPQLFMGFGYENGVYRPSEAMESEMELKEQISSLESFLGLEPDETTTELSGSAEPDSVDLWMLDDLVTHHQQQPQLFY

SEQ ID NO: 221 - DNA, 1143 bp, Gossypium barbadense
ccatctgaaaaaaaaacaggttttcttttaagataacacccaaaaatgtgtggaggtgcaattatttccgatttcgtcgcccccaaatatgaccggaaattgaccggcgatgacctttggtctgaacttgacatattctccgacctcctaggtttcgacaacaatggcaaaagctttgtcaatcatcagtttcataacaacaacaacaacaagctcattaatccaaaagacaatcaacttaacaaagagagaagcgagacgattcagaagacaagccaagtcactaaaaaggttgaaaagactcagcgaactcggaaaaacttttacagaggaataagacaaagaccatggggcaaatgggcagctgagattagagaccctcaaaaaggcgttcgagtttggctcggtacctataacacagccgaagaagcgactcgagcctacgatgaagcagccaagcgtatccgtggtgataaagccaagctcaacttccctcaaacgcccaccaaaaatcaagcagcttcaccagctcttactctgcttcctcctgctaagaaaaggtgcatcgttcccggagttaactcaaccgagtttaccagactggactcaccacctatatccctatgggttcttggggtatgagaagaagtgaaagattataagccgattgaagtggtggagagtgagttggagttgaaagaacaaatctggagccttggaatcatccctgggtttggagactaaccatgagactatgactcagctgagtggtaacggtgggactgacccactggagctttggacacttgatgaccccgtaacccagtataagcaacggcgctaacatgttcattagtgggggcgaaaattaaataatagttagcattaatcaatgtttttgtgttacttagggtttttttatttatgctatcatgcattatatatatatatgagaataaaggattaacgctttgctcttgcatggattagttagcgttaatcaatatttgtgtttagggttttttattatgttgttatatatgtatatgcttatgactttcatgtttgtatcaatgcattagttgcattatatatataagaataaaggatttaacaaaaaaaaaaaaataaaaaaaaaaaaaa

SEQ ID NO: 222 - protein, 198 aa, Gossypium barbadense
MCGGAIISDFVAPKYDRKLTGDDLWSELDIFSDLLGFDNNGKSFVNHQFHNNNNNKLINPKDNQLNKERSETIQKTSQVTKKVEKTQRTRKNFYRGIRQRPWGKWAAEIRDPQKGVRVWLGTYNTAEEATRAYDEAAKRIRGDKAKLNFPQTPTKNQAASPALTLLPPAKKRCIVPGVNSTEFTRLDSPPISLWVLGV

SEQ ID NO: 223 - DNA, 1079 bp, Gossypium hirsutum
gcacgaggatctaagaacccgaaaagtagagctttggttctctgtctgctgcttctttcttctcttggtacttcattatttttcctttcacttcctttttgtgaaaaaacattgaaacccttttcaagacgcaatagaagatgtgtggaggtgcaatcatttccgatttcattgccgtgaaacgcggtcggaagttaaccgccgaggatctttggtctgaacttgacacattctccgacctgttgggtctggattacggaaatggaaaagaccctttcactcagttcgacaacaccaaggccggttccaaagccaagaaccttgaaaaagtgacaaacgagtcgactcagaagacaagccgggggagagagaaagaagggaagactcagcgaactcgaaagaacatttacagaggaatcaggcgaaggccatgggggaaatgggcggctgagataagagatcctcacaaaggtgtccgaatctggctcggtacatacaacacggctgaagaagcggctcgagcctacgatgaagccgccaagcgcatccgcggggacaaagccaagctcaacttccctcaaactccacgcctaactcagcctcctgctaagaaaaggtgtatgatggctcctgagttgactccaccgagttctgaaaccaagagcccaccaaccccacaaccttttatgggttttggttacgagaatggagtttacaggccgagtgaagcaatggaaagcgagatggagctgaaggagcaaatctcgagtctggagtccttcctgggtttggagcctgatgagatgacaactgagttgagtggaagcgctgagcctgagtcagtgaacctttggatgcttgatcaccttgtgacacatcatcaacaacagcctcagctcttttattagaaattaaaaagtttaaattagggtaatgttatgtttgatatgattatgcttaagactttaatgtttgtattaatgaagggtaaatagttgtgacaataaaaagattggccacccagttttaatttatatttatttcctaaaattctaaaaaaaaaaaaaaaaaaaaaaaaa

SEQ ID NO: 224 - protein, 255 aa, Gossypium hirsutum
MCGGAIISDFIAVKRGRKLTAEDLWSELDTFSDLLGLDYGNGKDPFTQFDNTKAGSKAKNLEKVTNESTQKTSRGREKEGKTQRTRKNIYRGIRRRPWGKWAAEIRDPHKGVRIWLGTYNTAEEAARAYDEAAKRIRGDKAKLNFPQTPRLTQPPAKKRCMMAPELTPPSSETKSPPTPQPFMGFGYENGVYRPSEAMESEMELKEQISSLESFLGLEPDEMTTELSGSAEPESVNLWMLDHLVTHHQQQPQLFY

SEQ ID NO: 225 - DNA, 916 bp, Gossypium hirsutum
atgagactatgcggccgctgttacaagtcgacgaatcaacttaacaaagggagaagcgagacgattcagaagacaagccgagtcactaaaaatgttgaaaagactcagcgaactcggaaaaacttttaccgaggaataagacaaaggccatggggcaaatgggcagctgagattagagaccctcaaaaaggcgtccgagtttggctcggtacccataacacagccgaagaagcggctcgagcctacgatgaagccgccaagcgtatccgtggtgataaagccaagctcaacttccctcaaacgcccaccaaaaatcaagcagcttcaccagctcttattcagcttcctcctgctaagaaaaggtgcatcgttcccgagttaactcaaccgagtttccagactgactcaccaccttatcctatgggtcttgggtctggaagaagtgaagattataagccgattgaagtggtggagagtgagttggagttgaaagaacaaatctggagcctggagtcgttcctgggtttggagcctgatgagacaacaactgagttgagtggaagtgctgagcctgactcagtggacctttggatgcttgatgaccttgtgacacatcatcaacaacagcctcagctcttttattagaaattaaaaagttttaattagggtaatgttatgtttgatatgattatgcttaagactttaatgtttgtattaatgaagggtaaatagttgtgacaataaaaagattggccacccagttttaatttatatttatttctaatttgggtgacatgtaaattggtttcgagaaacattgaagtacccataatgttagttcatgtatcagatatagtaaacactttggattaataaaaaaacctcctaatattttatttgtaaaaaaaaaaaaaaa

SEQ ID NO: 226 - protein, 214 aa, Gossypium hirsutum
MRLCGRCYKSTNQLNKGRSETIQKTSRVTKNVEKTQRTRKNFYRGIRQRPWGKWAAEIRDPQKGVRVWLGTHNTAEEAARAYDEAAKRIRGDKAKLNFPQTPTKNQAASPALIQLPPAKKRCIVPELTQPSFQTDSPPYPMGLGSGRSEDYKPIEVVESELELKEQIWSLESFLGLEPDETTTELSGSAEPDSVDLWMLDDLVTHHQQQPQLFY

SEQ ID NO: 227 - DNA, 1190 bp, Gossypium hirsutum
ataaccgtcggtctataaatcctagaccccaataccaaagctttttccatctgaaaaaaaaacaggttttcttttaagataacacccaaaaatgtgtggaggtgcaattatttccgatttcgtcgcccccaaatatgaccggaaattgaccggcgatgacctttggtctgaacttgacatattctccgacctcctaggtttcgacaacaatggcaaaagctttgtcaatcatcagtttcataacaacaacaacaacaagctcattaatccaaaagacaatcaacttaacaaagagagaagcgagacgattcagaagacaagccaagtcactaaaaaggttgaaaagactcagcgaactcggaaaaacttttacagaggaataagacaaagaccatggggcaaatgggcagctgagattagagaccctcaaaaaggcgtccgagtttggctcggtacctataacacagccgaagaagcggctcgagcctactatgaagccgccaagcgtatccgtggtgataaagccaagctcaacttccctcaaacgcccaccaaaaatcaagcagcttcaccagctcttactcagcttcctcctgctaagaaaaggtgcatcgttcccgagttaactcaaccgagtttccagactgactcaccaccttatcctatgggtcttgggtatggaagaagtgaagattataagccgattgaagtggtggagagtgagttggagttgaaagaacaaatctggagcctggaatcattcctgggtttggagactaaccatgagactatgactcagctgagtggtaacggtgggactgactcactggagctttggacacttgatgacctcgtaactcagtataagcaacggcgctaacatgttcattagtgggggcgaaaattaaataatagttagcgttaatcaatgtttttgtgttacttagggtttttttatttatgctatcatgcattatatatatatatatgagaataaaggattaacgctttgctcttgcatggattagttagcgttaatcaatatttgtgtgttaattagggttttttattatgttgttatatatgtatatgcttaaggactttcatgtttgtatcaatgcattagttgcattatatatattaagaataaagggattttacacgttgcagtttgaaaaaaaaaaaaaaaa

SEQ ID NO: 228 - protein, 262 aa, Gossypium hirsutum
MCGGAIISDFVAPKYDRKLTGDDLWSELDIFSDLLGFDNNGKSFVNHQFHNNNNNKLINPKDNQLNKERSETIQKTSQVTKKVEKTQRTRKNFYRGIRQRPWGKWAAEIRDPQKGVRVWLGTYNTAEEAARAYYEAAKRIRGDKAKLNFPQTPTKNQAASPALTQLPPAKKRCIVPELTQPSFQTDSPPYPMGLGYGRSEDYKPIEVVESELELKEQIWSLESFLGLETNHETMTQLSGNGGTDSLELWTLDDLVTQYKQRR

SEQ ID NO: 229 - DNA, 1460 bp, Manihot esculenta
ctgcagcgacaaccaccatgtgtggcggtgctatcatctccgacttcatccctgccaccgctgctggccgatcctcgcgacggttgacagcggactttctctggcctgatctaaagaagcccattgggaaaatcgttggtgaccttgacgatgatttcgaggctgatttccaggagtttaaggatgagtctgatgtcgatgaggaagatgacgttttgtttgatgtcaagcctttctctttctctgctactgcttctcctcctcctcgcaatcgcagtccttcacgtggttctacagctgtaaagtctgtggaatttaatgggctagctgaaaaatctgcaaagagaaagagaaaaaaccagtacagaggaatccggcagcgcccatggggaaaatgggctgctgagattcgtgaccccaggaaaggggtgcgtgtctggctaggaacattcaatactgctgaagaagctgcaagagcgtatgatgctgaggcacgtagaattcgtggcaagaaagctaaagtgaactttcctgatgaagctccacgtgcttccccaaagcggacaatgaaggcaaaccctcagaaaccacttcctaagagaaatgctactgagagtatgagttacttgaacaatccagatcaggactacttcaatactttgggctctgttgatgagaaaccactagtgagccagtttgatttgatggactcttttcctgccaatggagatgctacagtcaaatctattcctccatgtgataatgttcccacgtttttcaattctgatcagggaagcaactcatttgaatgttccgactttggatggggggagcaggcctcaaagactcctgaaatctcatctgttctttcagctactccagaaattgatgaatcacttttcatggatgatgctaaccctaaaaagaagatgaagtctgactctgaaaatgcagttcctatagaagaaagcaatggaaaatctctatcagaggagttgttggcttttgacaaccagatgaactttcagatgccttatcttgagggaagttgggaggcttcacttgatggcttccttaatggagacgtgactcaggatggtggaaatccaatggacctgtggagctttgatgacctccctaatatggttgggggagtttattgagcaaaatcataattgccggttggcttctgtaaataaggctacatggatggttttctctctgaaatgtattacaagcacatctgaacatgcttaatcctttgaggagagtgtcctagggagcttttggtacaagagttgtagtaaataggaatatttagtttcccttttacattttgagacactggacttgggttgttcaatttaataactgtaattgacaatgtgcgtgtgatttgtgtttaaaactgatataaattttatctctactgttgtttttaaaaaaaaaaaaaaaaaaaa

SEQ ID NO: 230 - protein, 381 aa, Manihot esculenta
MCGGAIISDFIPATAAGRSSRRLTADFLWPDLKKPIGKIVGDLDDDFEADFQEFKDESDVDEEDDVLFDVKPFSFSATASPPPRNRSPSRGSTAVKSVEFNGLAEKSAKRKRKNQYRGIRQRPWGKWAAEIRDPRKGVRVWLGTFNTAEEAARAYDAEARRIRGKKAKVNFPDEAPRASPKRTMKANPQKPLPKRNATESMSYLNNPDQDYFNTLGSVDEKPLVSQFDLMDSFPANGDATVKSIPPCDNVPTFFNSDQGSNSFECSDFGWGEQASKTPEISSVLSATPEIDESLFMDDANPKKKMKSDSENAVPIEESNGKSLSEELLAFDNQMNFQMPYLEGSWEASLDGFLNGDVTQDGGNPMDLWSFDDLPNMVGGVY

SEQ ID NO: 231 - DNA, 1409 bp, Populus alba x Populus tremula
ataatcaccatcaatcaacatgtgtggcggtgctatcatctcaggcttcatcgctccgacaaccaccgctcgatcttctcggcggttgacctcgggctttgagtggcttgagccgaagaaacccttcaacaacaagcacttgaagccagttgttgctgatcccgaagatgattttgaggctgatcttcaagagtttaaggacgagtctgatgtcgacgaggattatgatgtctttgctgatgccaagccttttgctttctctgccagtgcttctgaacctgctaaaaaacgtgggctccctcgtggttctactgctgttaaatctgctggattcagtggacttgctaaaaactcagcaaagaggaagagaaagaaccagtttagaggaattaggcagcgtccatggggaaaatgggctgctgagattcgtgatcccaggaaaggggtacgtgtctggttgggaacattcaatactgcagaagaagctgctagagcatatgattctgaggcacgtagaattcgtggcaagaaagcgaaggtgaacttccctgatgaagctccatgtgcttcagcaaggcatccaattaaggaaaactcacagaaacgacttacaaaggcaaatttaagccaggattttagttacttgagcaacccagaaacggattataataatatgggctttgtggaagagaaaccacaagtgagccagtttggaataatgaattctatcccggtcaatggagattctggggtgacgcccttaactccttctgacaatgcttctatgtatttcaattctgacaaggggagcaactcatttgattgtgactttgggtggggagaacaaggcgctgaaatcttgtctgttcttgcagcaactccagaagttgatgaatccgtctttgtggaagctaatcctaagaagttgaaatcatacactgagtatgcagtgcctgttgaagagaggaatggaaaatctctgtccgaagagttgctggcttttgacaatcagttgatgaaccttcagatgccagatcttgtgggtaactgggaggcttctcttgatagcttccttaatggagacacaactcaggatggcacaaacgcagtggacttgtggagcttcgaagacttcccctccatggttgggggagtttattgagccaacttttctgtgcttgccaggttttgtaaataataaggctacatgaatggttgtttatctgagatgggaatggagtgcaacacagatgaacatgcttagccttggtgtgggagaagcattctcaggagcattttccatataaaagtagtacatcggtttcccgtttcattacatttggagtcactggactttggaagttggattcgatgactgtaatttgacaatgtggtgtgacttatttaga

SEQ ID NO: 232 - protein, 380 aa, Populus alba x Populus tremula
MCGGAIISGFIAPTTTARSSRRLTSGFEWLEPKKPFNNKHLKPVVADPEDDFEADLQEFKDESDVDEDYDVFADAKPFAFSASASEPAKKRGLPRGSTAVKSAGFSGLAKNSAKRKRKNQFRGIRQRPWGKWAAEIRDPRKGVRVWLGTFNTAEEAARAYDSEARRIRGKKAKVNFPDEAPCASARHPIKENSQKRLTKANLSQDFSYLSNPETDYNNMGFVEEKPQVSQFGIMNSIPVNGDSGVTPLTPSDNASMYFNSDKGSNSFDCDFGWGEQGAEILSVLAATPEVDESVFVEANPKKLKSYTEYAVPVEERNGKSLSEELLAFDNQLMNLQMPDLVGNWEASLDSFLNGDTTQDGTNAVDLWSFEDFPSMVGGVY

SEQ ID NO: 233 - DNA, 1523 bp, Trifolium pratense
gaatcaatcaacaaaacaaaacccagtaaaaatttcaatcctttttaacaaaatcttcaattgggtataagaaagtttcaatctttttcttgttaagataaagacaaagatctgacaaaaacagaaagatgtgtggtggtgctattatttccgacttcattccagctgcggcggcggtgggtggttcccgccgtgtcactgctgatatcttgtggccaaatttgaggaaaactggttccaaaaaatcatcttttttgcttgacgatgattttgaagctggtttcagacagtttaaggatgattctgatttcgatgaagacgaggatgaagatgacgatgaagggttgttggtcggtgtcaaaggttttacctttgctgcttctaacaacaaatcttcaaggaacttctctcgtggctcggctggtgcaaaatccgtggcatcgaaatcaaatgagcaagctgaaaaggaatcaaagagaaagaggaagaatcagtataggggtatccgccaacgtccatggggaaaatgggcagctgagatccgtgatccaaggaaaggagtccgtgtttggctcggaactttcaacactgctgaagaagctgcaagagcttacgatgctgaagctaggagaatccgtggcaagaaagccaaggtgaatttccccgatgaggctccaaatgcttcctcaaaacgtctgaagacaaatcctgataaccagctgttgaacaaaaatctgaactctttcaagccgaacggaaacaacaaaatgttcaatttcagcgagaatatggagaacttctattctcctatggatcaggttgaacagaaaccattggttaacaaccaatatggtgctgctgacattggagccttcactggaaacggagttcaccttgcacctgctgatgttaatgcttatttcagttctgagcattcaagcaactcgtttgattattctgatttatgttggggggaacaaggcccgaaaacccctgagatttcctcggtgttttctgctcctctcgaagctgaacctcagatgaacatgcagtctaacaactctcaggatatgctacctatgcaagctgaatctgcaaagacactctctgaggagcttgcagatatcgaatcccagctgaagttcttcgagaactcattcgatgataactggagtgatgcttcacttgcgtctttgctcggtgctgatgtaactcaggatgctggaaacacaatgaacctttggagctttgatgacctgccttccatcgcaggcggagttttctgaacaactttcgcctcaccggttatgtaaataaagctacaagttagtaactttcagtttacattcggtttggttcattttgtttttacaaggtggataattaaattgttttgttttcaggattgttggtttatttttatattgttgatggaatcagaaacaagaacaagttaccagctttaattaagcgtggagttttattctcttgtggcaaaaataaattatttataggtttttatt

SEQ ID NO: 234 - protein, 385 aa, Trifolium pratense
MCGGAIISDFIPAAAAVGGSRRVTADILWPNLRKTGSKKSSFLLDDDFEAGFRQFKDDSDFDEDEDEDDDEGLLVGVKGFTFAASNNKSSRNFSRGSAGAKSVASKSNEQAEKESKRKRKNQYRGIRQRPWGKWAAEIRDPRKGVRVWLGTFNTAEEAARAYDAEARRIRGKKAKVNFPDEAPNASSKRLKTNPDNQLLNKNLNSFKPNGNNKMFNFSENMENFYSPMDQVEQKPLVNNQYGAADIGAFTGNGVHLAPADVNAYFSSEHSSNSFDYSDLCWGEQGPKTPEISSVFSAPLEAEPQMNMQSNNSQDMLPMQAESAKTLSEELADIESQLKFFENSFDDNWSDASLASLLGADVTQDAGNTMNLWSFDDLPSIAGGVF

SEQ ID NO: 235 - DNA, 1539 bp, Glycine max
attgagccaaagctttgtattttctgcgataattttccattgggtggaagaaagtctcaacctttattcgaaagagcaaggatctgagttgagttgagtgatcatgtgtggtggtgcgattatctccgacttcataccggcaggtcccgccagcggggcgcggcgcgtgaccgccgacatcctgtggccgagtttgaggaagcgcttctcgaagccgctgctggacgatgatttcgaggctgggttcagagaattcaaggatgattcggaaatcgaggatgttgatgacgaggacgatgaagacgaggaggagttgaagaagaagccctttgggttctctcgctccagcaacaaggctgcttctaagcctctctctcgtggagcaacaactgtgaaatctgtggaatcaaaggggcaagctgagaagtgtgccaagagaaagaggaagaaccagtatcgcggaatccgccagcgtccatggggaaagtgggctgctgagattcgcgacccaagaaagggggttcgtgtttggcttggaactttcagcactgctgaagaagctgcaagagcttacgatgctgaagcaaggaggatccgtggcaagaaagccaaggtgaatttccctgatgagccttcaggcgctgcttcctcaaaacgtctcaaggcgaatccagaggctcagccaatgaagaaaaatctgaactctgtgaagccgaaaataaaccagatgttcaattttggtgacaatcttgagggctactacagccctatagatcaggtggaacagaaaccactggttaaccagtatgttaaccgtgccccgtttgctggaaatggagttcaagtctcacctgttactccatctgctgatgttactgcttacttcagctctgagcattcgagcaactcgtttgattattctgaccttggatggggtgaacaagtccccaagacccccgagatctcatccttgctttctgctgctcctttggagggtgctgctgatcaggttcagaagaccaacaactcgcaggatgtggtggctgcacaagatgattctgcaaaaaccctttccgaagagcttgcagacattgaatcccagctcaagttctttgagaccccttcttttcttgatgaagcctgggctgatgctacattggcgtctttgctcggcggagacgcaactcatgacgccgccggaaaccctatgaacctttggagcttcgacgacctgccttccatggcaggagtcttctgaacaccctttatctccccttttatgtaaataaagctacaagaattgtgatcgtgatgttggtgatggagtccacagccaagaaacctgcttaaagcttatgtggagtttattttatcttgtagctaatgcagtagtataggactatatataggtttttattatagggtatccttttgtgaactcaaagacctcgttttcaggggattttctgtttgatgtccttaaggattatcaattatgttatatatggtcttggataaaaataaaaaaaaaaaaaaaaa

SEQ ID NO: 236 - protein, 384 aa, Glycine max
MCGGAIISDFIPAGPASGARRVTADILWPSLRKRFSKPLLDDDFEAGFREFKDDSEIEDVDDEDDEDEEELKKKPFGFSRSSNKAASKPLSRGATTVKSVESKGQAEKCAKRKRKNQYRGIRQRPWGKWAAEIRDPRKGVRVWLGTFSTAEEAARAYDAEARRIRGKKAKVNFPDEPSGAASSKRLKANPEAQPMKKNLNSVKPKINQMFNFGDNLEGYYSPIDQVEQKPLVNQYVNRAPFAGNGVQVSPVTPSADVTAYFSSEHSSNSFDYSDLGWGEQVPKTPEISSLLSAAPLEGAADQVQKTNNSQDVVAAQDDSAKTLSEELADIESQLKFFETPSFLDEAWADATLASLLGGDATHDAAGNPMNLWSFDDLPSMAGVF

SEQ ID NO: 237 - DNA, 458 bp, Narcissus pseudonarcissus
atgtgtggaggagcaataatctctgatttcatacctccatcaaggtcaaggaagctcactgccgattacttgtggcccaatctcaacaaggggaaggacaagaagaagagctttgggtttgaagatgactttgaagctgacttcaatgagtttgaagatgagtctgaggagggggaatctgaagctgttgatgtcaaaccctttaagtttggggctaaagctggcttttctagagagggatcgacttatctgaaacccatcgaactcaatggagctgctgaacgatcatccaaaaggaagaggaagaaccaatacagaggtatccgtcagcgtccatggggtaaatgggcagctgagataagagatcctaacaaaggagttcgtgtttggctgggaacttttaacacagctgaagaagctgcgagagcctatgatgatgaagcccgtaggatccgtgg

SEQ ID NO: 238 - protein, 153 aa, Narcissus pseudonarcissus
MCGGAIISDFIPPSRSRKLTADYLWPNLNKGKDKKKSFGFEDDFEADFNEFEDESEEGESEAVDVKPFKFGAKAGFSREGSTYLKPIELNGAAERSSKRKRKNQYRGIRQRPWGKWAAEIRDPNKGVRVWLGTFNTAEEAARAYDDEARRIRG

SEQ ID NO: 239 - DNA, 823 bp, Arabidopsis thaliana
agtaatttagcagcaacaaacagagaaaatgtgtggcggtgctattatttccgattatgcccctctcgtcaccaaggccaagggccgtaagctcacggctgaggaactctggtcagagctcgatgcttccgccgccgacgacttctggggtttctattccacctccaaactccatcccaccaaccaagttaacgtgaaagaggaggaggcggtgaagaaggagcaggcaacagagccggggaaacggaggaagaggaagaatgtttatagagggatacgtaagcgtccatggggaaaatgggcggcggagattcgagatccacgaaaaggtgtcagagtttggcttggtacgttcaacacggcggaggaagctgccatggcttatgatgtagcggcgaagcagatccgtggtgagaaagccaagctcaacttcccagatctggatcatcatccttctactcctccgccatcgtctacttcactaagattatccgatcagccaccggcgaagaaggtttgcgttgtctctcagagcgagttagctcagccgagtttcccggtggagtgtgttggatttggaaagggggaagagtttcagaacctgatgtacggatttgaaccggattatgatttgaaacagcagatatcgagcttggagtcgttccttgagcttgacggtaccacggcggagcaaccgagtcaactagatgagtctgtttgcgatgtggatatgtggatgcttgatgatgtcattgcgtcgtatgagtaaaaggaaaaaaaaacagaagataatgtaatatgtaaaaaaaaaaactaaattact

SEQ ID NO: 240 - protein, 246 aa, Arabidopsis thaliana
MCGGAIISDYAPLVTKAKGRKLTAEELWSELDASAADDFWGFYSTSKLHPTNQVNVKEEEAVKKEQATEPGKRRKRKNVYRGIRKRPWGKWAAEIRDPRKGVRVWLGTFNTAEEAAMAYDVAAKQIRGEKAKLNFPDLDHHPSTPPPSSTSLRLSDQPPAKKVCVVSQSELAQPSFPVECVGFGKGEEFQNLMYGFEPDYDLKQQISSLESFLELDGTTAEQPSQLDESVCDVDMWMLDDVIASYE

SEQ ID NO: 241 - DNA, 918 bp, Medicago truncatula
atgtgtggtggtgctatcatcgctgacttcattcctcgccgtgacggccgccgtctcaccgcctcggagctctggcctaactcatttggccaacagattgactcctcaaacttcggtttttctcatactgctgctgatcaacaaccacccagcactctcaaaagatcacagcctcccaaagttaatgaacgagttgagaagccactgaaaaaacagaggaagaatctctatagaggaattcgacagcgtccatggggaaaatgggctgcagagattcgtgatccaagaaaaggagttcgtgtttggcttggtacattcaacactgctgaagaagctgctagagcttacgacaaagaagctcgaaaaatccgtggcaaaaaagctaaggttaattttcctaacgaagatgatgaatataccattcatgctactcgtcgctacaataataatcctccaccgattcgaccacagaagcttcctctatatcatcaacaacactatcagaagaatctgaacttggaatttggttatgatctgaaccaaactgacacaattcatgctatcaatactggttctggtggtgatgagaattctttatttgggtctggttcagtttcagaggttggtttttctgtgatggagttcaatggtggttccaatcagaatgaattcggttattttggtggtgttgtgaatgaacatgaaaaagagaaagagaaagtggtagaacaagaaacacatgttgttgaacaagctgaagctgaattagcaaaaaatgaggtacaagaattgtctgatgaattgttggcatacgaggattacatgaagttttatcagatttactatgatggacaatcagtgatgccacctaataatgttcaggaacatgtggttggagatttatggagctttgattga

SEQ ID NO: 242 - protein, 305 aa, Medicago truncatula
MCGGAIIADFIPRRDGRRLTASELWPNSFGQQIDSSNFGFSHTAADQQPPSTLKRSQPPKVNERVEKPLKKQRKNLYRGIRQRPWGKWAAEIRDPRKGVRVWLGTFNTAEEAARAYDKEARKIRGKKAKVNFPNEDDEYTIHATRRYNNNPPPIRPQKLPLYHQQHYQKNLNLEFGYDLNQTDTIHAINTGSGGDENSLFGSGSVSEVGFSVMEFNGGSNQNEFGYFGGVVNEHEKEKEKVVEQETHVVEQAEAELAKNEVQELSDELLAYEDYMKFYQIYYDGQSVMPPNNVQEHVVGDLWSFD

SEQ ID NO: 243 - DNA, 723 bp, Medicago truncatula
atgtcaccccctaaaccgtatataaaccaactcaaatctctgactttcccttcaacttcaaaatcttctaaaccttcaaaaactcagtttccatacatgaactacgccttctccactaccaccctcacctccgatcaagaactctcagtcatcgtcgctgccctaaccaacgtagtctccggttccacctccaccgtcggcttagatcgaatagttcaaccggtgaacatagaaacctgtcgggaatgcaacatagcaggatgtttaggatgcaatttcttccctgaagagaaaaaacaaaaacaaaaacaaaaacaaaagagagctaagaataataagtacagaggagtgaggcagagaccatggggaaaatgggctgctgagattcgtgacccgagacgtgcggttcgtgtttggcttggaacctttaccacggcggaggaagctgctagagcttacgacaatgccgctatcgagttccgcgggccgagagccaagcttaattttccacttgttgatgaatctcttaagcgtactgttgaggatccagaattggttgttcatgtaaaggatgaagaaatgcaaattgagacaacgatgggatttgggaataatacgactgaatgtgatttttgggatagtattggggaagaagctgattttcaacaacttatgaggtttatggattcttctcattctagaacaggaaacacttttaattag

SEQ ID NO: 244 - protein, 240 aa, Medicago truncatula
MSPPKPYINQLKSLTFPSTSKSSKPSKTQFPYMNYAFSTTTLTSDQELSVIVAALTNVVSGSTSTVGLDRIVQPVNIETCRECNIAGCLGCNFFPEEKKQKQKQKQKRAKNNKYRGVRQRPWGKWAAEIRDPRRAVRVWLGTFTTAEEAARAYDNAAIEFRGPRAKLNFPLVDESLKRTVEDPELVVHVKDEEMQIETTMGFGNNTTECDFWDSIGEEADFQQLMRFMDSSHSRTGNTFN

SEQ ID NO: 245 - DNA, 1138 bp, Solanum tuberosum
attcggcacgagaccaaaaccaaaaccaagcttctctcttgttataatatatatatatataaaaaaaactcgacctttgtacaaaccatttttcatatctgtatcaatctctttgtttctgccattttgagtaaaagagtttaaatcacactaaaatgtgtggtggtgcaattctttatgatattattcctcgtgaccgccgtttgtcatccaccgacttatggccaagctctgctgatttctggcaaacttcttctttttccaagccaatttccacccaaaatgttcctcccaagcctaaacgagctcaactctctagaggtagtgagcagatgaagaagaggcaaaggaagaatctttacaggggaatccgacaacgtccatggggtaaatgggctgctgaaattcgtgacccgagaaaaagggttagggtctggttaggtactttcaacactgctgaagctgcaagagcttatgatagagaagctcgtaaaatcaggggaaagaaagctaaagttaatttccccaatgaagacgacgaccactactacagtcatccagagccgcctcctttgaacattgtttatgaatcttatgatactactagtacttacaatcaagaatcaaataactgttaccccttccactcaatcgaaaacactgaacctgttatggaattcgcaattgctaacaaaaattcatctgggtctgcttataatggaattgaagatcagaatgtggaaggagaagagcagacggtgaaaaattcaaataacaggatcgtagaggaagaggaaaaaacagaggatgaagtgcagatactttctgatgaactgatggcttatgagtcattgatgaagttctatgaaataccgtatgttgacgggcaatcagtggcggcgacggtgaatccagcggcggacaccgaagtgggcggtggctcgatggagctttggagttttgatgatgttagtcgtctacaaccaagttataatgttagtttgattattgttttgtttaaattgttgcatctttttagtttgctgaattagaactaattgagtttttgtaatttttaatcaattgtgttgaaactatatttttahttcattactctattaaaaaaaaaaaaaaaaaa

SEQ ID NO: 246 - protein, 298 aa, Solanum tuberosum
MCGGAILYDIIPRDRRLSSTDLWPSSADFWQTSSFSKPISTQNVPPKPKRAQLSRGSEQMKKRQRKNLYRGIRQRPWGKWAAEIRDPRKRVRVWLGTFNTAEAARAYDREARKIRGKKAKVNFPNEDDDHYYSHPEPPPLNIVYESYDTTSTYNQESNNCYPFHSIENTEPVMEFAIANKNSSGSAYNGIEDQNVEGEEQTVKNSNNRIVEEEEKTEDEVQILSDELMAYESLMKFYEIPYVDGQSVAATVNPAADTEVGGGSMELWSFDDVSRLQPSYNVSLIIVLFKLLHLFSLLN

SEQ ID NO: 247 - DNA, 1132 bp, Solanum tuberosum
ctttcactcaaaaaaaaaaaggaaaaaattaagagtaacaaaagatgtgtggaggtgccataatctccgattatgagcccgccggaaacttctaccggaaactctctgctcgtgacctgtgggctgagctggaccctatctccgactactggtcctcttcctcctcatcctcaactgtcgaaaacccttattccgctcagtcgccggtgactcactccgtcgataagcctaagaaatcagattccggcaaatctaatcaactcaaaaaaggtaataagactgtgaaggttgagaaggagaagagtactggaccaaggcagagaaagaacaagtacagaggaataaggcagagaccatggggaaaatgggctgctgagattcgcgatcctcagaagggtgtccgtgtttggcttggtacattcaacacagcagaggatgctgccagagcctatgatgaggctgctaagcgcattcgtggtaacaaggccaaactcaacttccctgccccatcaccacctgctaagcgacagtgcactagcactgtcgctgctgatcctccaccagcactactccttgagagttctaacataatatcttataacaattctcctttaatgaacttcggatatgatgttcagagccaaactccctactacccaatggaaatgcccgttgctagtgatgattatgaactcaaggaacagatttccaacttggaatcgttcctggaattggagccagcagattcatctgatcagttttcagggatcgtcgatcctgatcctcttaatgtttttctgatggaggattttgcttcaactcagcatcagttctattgatcctgagttgtttggtgagtgatgagtgactagtttattagcttttggctgtagtagtagtaatagagaaaaaagtacatatgatatgataataataagttgcgtgccttagcctgcaattgtaatagtatcaatgtttgttgtcttgtgttgtttatgctttctaaatcttggatttaccttataatgtttggtcatttggtgtatgtattgtaactatatatggagtactttattactaaaaaaaaaaaaaaaaaaaaaaaaaaaaaaaaaaaaaaaaaaaaaaaaaaaaa

SEQ ID NO: 248 - protein, 264 aa, Solanum tuberosum
MCGGAIISDYEPAGNFYRKLSARDLWAELDPISDYWSSSSSSSTVENPYSAQSPVTHSVDKPKKSDSGKSNQLKKGNKTVKVEKEKSTGPRQRKNKYRGIRQRPWGKWAAEIRDPQKGVRVWLGTFNTAEDAARAYDEAAKRIRGNKAKLNFPAPSPPAKRQCTSTVAADPPPALLLESSNIISYNNSPLMNFGYDVQSQTPYYPMEMPVASDDYELKEQISNLESFLELEPADSSDQFSGIVDPDPLNVFLMEDFASTQHQFY

SEQ ID NO: 249 - DNA, 1259 bp, Coffea canephora
aagtaccgcaaatttgtaagcttagatcatcaaaaatgtgtggcggtgcaatcctcgaaggcctcatcccgccccgcaacaacaacgacggcactcgccgtctctcctccgctgacctctggccctccgctgctgatttttggcccaactctcaccttgccaagcccagccgctccaacccaactgatgccccccacaaagccacgcacgaaacttgtcacgatccacatgatgaagctggtggaaagcagcaagtccttcccaagggtgccaagaggcagaggaaaaacttatacagggggatcaggcagcgaccatgggggaaatgggctgctgagattcgagaccctaggaaaggcgtgagagtctggttgggcactttcaacactgccgaagaagctgccagagcctacgacaaagaagctcgaaaaatcagaggcaagaaagccaaggttaacttcccaaacgaggattcgaccagttatcccacatgcatcccttcgcaaacccagtaccaacaggtacacatccccagccctcccactttctgtggtccctcctcctccaattgcaagttcaatcagctccgtgttgggtcgtctgattgcagtgccagtgactgctatcacgcgaacagcatcgatgattgtgcccgtttcaccaatatgatgggttttcgaaatccaagcgaagaggtttctggttctggtagttcggataatgagtgttttcttggccaccttaaacaagtagccaaggcggcggcggaggaggaggcggcttcggttataactgaaaatgatacgaaagacaataacaaagcagctgaaagcgaggagtaccaagtggaaaagctgtctgaggagctgctggcctatgagtccttcatgaagttctatcagattccttatatagatgggcagtccgcagctgcatcggccaaccctgctcaagagctggcaacttctattcagctttggagctttgatgatgtctcacccgccaatcgcccaatgcctctgtaaccgccaatcgcccaagttcgatggtcttttttttgggagtcccaattgcgttttggtgcctagtttttgtaggttttgctatgtaattgacattaacttcttaaaacattgtaggaaattgttgttaggttgcaggttggtactcttgaccggcttgtttagttaaaatacctatatgtaggttggcactttgtaattactgtttttgtggacaaaaaaaaaaaaaaaaaaaaa

SEQ ID NO: 250 - protein, 329 aa, Coffea canephora
MCGGAILEGLIPPRNNNDGTRRLSSADLWPSAADFWPNSHLAKPSRSNPTDAPHKATHETCHDPHDEAGGKQQVLPKGAKRQRKNLYRGIRQRPWGKWAAEIRDPRKGVRVWLGTFNTAEEAARAYDKEARKIRGKKAKVNFPNEDSTSYPTCIPSQTQYQQVHIPSPPTFCGPSSSNCKFNQLRVGSSDCSASDCYHANSIDDCARFTNMMGFRNPSEEVSGSGSSDNECFLGHLKQVAKAAAEEEAASVITENDTKDNNKAAESEEYQVEKLSEELLAYESFMKFYQIPYIDGQSAAASANPAQELATSIQLWSFDDVSPANRPMPL

SEQ ID NO: 251 - DNA, 1394 bp, Hordeum vulgare
caggaagagaaaacaatgtgtggcggcgccatcctagcgcagctgatcccgccgtcggcgggccgtccgtcgaagcaggcggcagcgggcggccgggccccgcccacgagctccaagaagggcggcgtgagcaagagccgccacagcagcaccccagatgccgacgacgacgtcttcgaggccgccttcgaggacttcgatgaccacttcgacctgcgggcggaggaggacggcggcgacgaccatgtcgtctttgcatccaagcctgccttctctccacgtccggcctacgacggtggccgcgcggcgcatgcggcgagcaggaagaagcgcaccggccacctccatggcatccggcagcggccgtggggcaagtgggcggcggagatccgcgacccgcacaagggcacccgcgtctggctcggcacgttcgacacggccgatgatgccgcccgggcctacgacgtcgccgcccgtcgcctccgtggcagcaaggccaaggtcaacttccccgacgcggccaggaccggggctcgcccgcgccgcgccagccgtagaaccgcgcagaaaccgcaatgcccccctgcgcggacgacggcgtactctgccaccgcagcagcacgcgcacagccggagcaggacgctatgatggtcaaacccgagctgatggagtttttcaacgtggacgccatcgtccacctgaccactgccgtcgccgcgctaccgcctgtcacggcgagcaccttcgccgacacgatgccgagggtcgacgaggactcttctgtggggagcggcggcggcgccatgctggggttcgccgacgagcttgggttcgatccgttcatgatgttccagctaccctgctcggacatgtacgaatccgccgacagcatcttcgccggagacgctgtcatcccggatgccctcagcgtggacagtggcatggacgccgtcagcctctggagcttcgacgagttccccatggacagcgccattttctgacgctttccgtgtgatgcactgcactctgttggttgtaagaatctccacctggcctctacgtagttccttgtaaatgcccgcgcacagaaccttgctcagaccagattctgtttcttggccaggaacgaaaggaagggttgctgccgatgcatgattgcttcctcgatgaacgcagattcgaaatgtattctactgtttgagtttcttgttcgtcacacactgtaccaaactgtattgtaccctatcataatttctgctcggtacctctctgtactgctggtaccaaactgtattgtactctgtcatgatctgtactagtctttggtactgctggtcaatagtcctacgaattgatcaaaaaaaaaaaaaaaaaaaaaaaaaaaaaaaaaaaa

SEQ ID NO: 252 - protein, 328 aa, Hordeum vulgare
MCGGAILAQLIPPSAGRPSKQAAAGGRAPPTSSKKGGVSKSRHSSTPDADDDVFEAAFEDFDDHFDLRAEEDGGDDHVVFASKPAFSPRPAYDGGRAAHAASRKKRTGHLHGIRQRPWGKWAAEIRDPHKGTRVWLGTFDTADDAARAYDVAARRLRGSKAKVNFPDAARTGARPRRASRRTAQKPQCPPARTTAYSATAAARAQPEQDAMMVKPELMEFFNVDAIVHLTTAVAALPPVTASTFADTMPRVDEDSSVGSGGGAMLGFADELGFDPFMMFQLPCSDMYESADSIFAGDAVIPDALSVDSGMDAVSLWSFDEFPMDSAIF

SEQ ID NO: 253 - DNA, 985 bp, Cucumis melo
aattctctaatcatgtgtggcggcgccattatcgccgacttaatccctcgccgtgacggccaacgcgttaccgcttccgacatttggcctaactcctccttcttccatttcaacaaaattcgctccgatcaagtttcaactcccctcaaacgaacccccctcccggcctcttccgaggcttcgaagcccaagaagaggcagaggaagaatctttacagaggaattcgtcagcgcccgtggggaaaatgggcggctgagattcgtgaccccaggaaggggatccgtgtctggcttgggactttcaatactgctgaggaagccgctcgagcttacgatcgagaagctcgcaagattcgtggaaagaaagctaaggtcaatttccctaatgaagatgatgcatattccattcaagctcccattcctcaatttcaccctcatctttacactgtccctgagaattccgaattcccctacgatctcaaccaaatcggtgatttcaccggcactcactttcccgtggcgattgaggaacaatccggctctgggtcggaggattcttattctccaccgaaaagattcggtgtgaaagaggctgaagatcagaagccggagcagaaggttagcgttattgccgcggcggaggaagagaacgaggtgcaaaagctttctgaggaactaatggcgtatgagaactacatgaagttctaccaaattccatacctcgacggtcaatcgacggtgacgaatccggctgaagaacaagtggtgggcgatctctggagcttcgacgacgaggatgggcttcacggctctgtttcgtcgtctgaattatgatgattgatgatccaataacttctccatatctcaaaccggtttcctccattttctattgttgttttgttatttaattccagaatgtgttttatgtaattttctgtcgttgaacgatgtcaatttgttgatatgaaaaaaaaaaaaaaaaaaa

SEQ ID NO: 254 - protein, 273 aa, Cucumis melo
MCGGAIIADLIPRRDGQRVTASDIWPNSSFFHFNKIRSDQVSTPLKRTPLPASSEASKPKKRQRKNLYRGIRQRPWGKWAAEIRDPRKGIRVWLGTFNTAEEAARAYDREARKIRGKKAKVNFPNEDDAYSIQAPIPQFHPHLYTVPENSEFPYDLNQIGDFTGTHFPVAIEEQSGSGSEDSYSPPKRFGVKEAEDQKPEQKVSVIAAAEEENEVQKLSEELMAYENYMKFYQIPYLDGQSTVTNPAEEQVVGDLWSFDDEDGLHGSVSSSEL

SEQ ID NO: 255 - DNA, 1010 bp, Malus x domestica
ctgagagggctcttttttctctctaagtttctacaagtggcaatataaacatgtgtggtggtgctatcatttccgacttcatcgccgtcaagcgcgccctgaagctgacggcggaggacctctggtcagatcttgacaccatctctgacctccttggcatagactactccaacagcatcaacaaacagccggagaatcacaaggtggtccaaaagccgaaaccatctatcaccaaagtagtgacaagtgatgagaagcccaagcaggcgagcgggtctgctgctgccgcaaaaggcaagagagtgagaaaaaacgtgtacagaggaataaggcagaggccgtggggcaaatgggcggctgagattcgcgacccctacaaagccgtccgggtctggctcggcacctatgacaccgctgaggaagccgcccgcgcttacgatgaagccgccgtgcgcatccgcggggacaaggccaagctcaactttgcccaaccaccatcctcttcaccgcttccatctctggcgccggatacgccgccgccgacaaagaggcggtgcattgttgctgagtcaactcgggtggagccgactcaaccgagtttccagaccggttcttactattatgatccattatatcacggcggtggtggtggggaaatgtatgctaagaaagaggtggcgggtggggacgaggtggtggtagagcagctgagtcaggtggtgagtggaagcggagagtcggactcgttgtacctgtggatgctggatgacctggtggcatatcagcaacaagggcagcttctgtattaaggcagcggaattgttctagctaaatatttgtatggctaggaattaaaaacatattaattaaagggtatgtatgtttaatttacgtgtgtgaaatgcgagtgttgagtatgtctatgactgggtttgtgtaacgtgtgttgtttgctacggtgtttatgtttaatagtaactgcttttgtctttgaaaaaaaaaaaaaaaaa

SEQ ID NO: 256 - protein, 252 aa, Malus x domestica
MCGGAIISDFIAVKRALKLTAEDLWSDLDTISDLLGIDYSNSINKQPENHKVVQKPKPSITKVVTSDEKPKQASGSAAAAKGKRVRKNVYRGIRQRPWGKWAAEIRDPYKAVRVWLGTYDTAEEAARAYDEAAVRIRGDKAKLNFAQPPSSSPLPSLAPDTPPPTKRRCIVAESTRVEPTQPSFQTGSYYYDPLYHGGGGGEMYAKKEVAGGDEVVVEQLSQVVSGSGESDSLYLWMLDDLVAYQQQGQLLY

SEQ ID NO: 257 - DNA, 1354 bp, Oryza sativa
  misc_feature (37)..(37): n is a, c, g, or t
  misc_feature (1324)..(1324): n is a, c, g, or t
ggcacgcgcctcctcggaatcgccacgagacccttgnagccagataaaaaaggaaaaaaagagagtcgtagttcgcctcttcttcctcctctcgttctcgcggccatatcgaattcctgcagcccgggggatccccgaattcagctcagtaaatctgttgattgctcgtttcaaatcatcatcggtgtttcgtttcttgatttcttgatccatccatggcgacgacagtggattggtgtggccgtggcagcaatcttcctgctgcgatgtatgacatggtggtggatagcaaggagctaatgggcgcgcttgctccgtccatggtgtccttctcctacccgtgttccgagcagagcgcgagctcgcttcttgctggcgccaactacctgactcccgcgcaggtgctccatgtccaggcgcagctacagcgcctgcgccgcccgggcgcggcgagcggctgcctcgccgcggcgccgccgctgccgatgaagcggcatggcgcggtggcggtggcggcggcggcggcggcggcgcgggcgccggtcaagctgtaccgcggcgtcaggcagcggcattggggcaagtgggtggcggagatccgcctgccgcgcaaccgcacccgcctctggctgggcaccttcgacaccgccgaggaggccgcgctggcgtacgacagcgccgcgttccgcctccgcggcgagtccgcgaggctcaacttccccgagctccgccgcggcggcgcccacctcggcccgccgctccacgccgcggtcgacgccaagctccacgccatctgccacgggatggacctgccccaaccccaaccccaaacccagagcaatgcgacgacgacgacgatgtcgacgacggcgacgaacaccccaagccccttcttctcctcggagagcccggtggtcaagagcgagcccgtctgctccgcctccgagagctcttcctcggccgacggcgacgtgtcatcgacgggctcctccgacgtcgtcccggagatgcagctgctcgacttctcggaggcgccatgggacgagtccgagagcttcctgctgcacaagtacccgtcgctggagatcgactgggacgccgatcctttcctgatgcagtggctgaatcttcttcctctccctgttcttgactccagctcttggtgtcctgaacattttcacaactcagagagtgatgctctaccttgattagctacatgttaatctaggttttgggtttgatcatgccatcggattctgtagcatcaacccctggtctgcttggttttttcaagtggcattgcacaggaaggaggtctcagagntttggtaattgcgagttgtgcaaccctgca

SEQ ID NO: 258 - protein, 330 aa, Oryza sativa
MATTVDWCGRGSNLPAAMYDMVVDSKELMGALAPSMVSFSYPCSEQSASSLLAGANYLTPAQVLHVQAQLQRLRRPGAASGCLAAAPPLPMKRHGAVAVAAAAAAARAPVKLYRGVRQRHWGKWVAEIRLPRNRTRLWLGTFDTAEEAALAYDSAAFRLRGESARLNFPELRRGGAHLGPPLHAAVDAKLHAICHGMDLPQPQPQTQSNATTTTMSTTATNTPSPFFSSESPVVKSEPVCSASESSSSADGDVSSTGSSDVVPEMQLLDFSEAPWDESESFLLHKYPSLEIDWDADPFLMQWLNLLPLPVLDSSSWCPEHFHNSESDALP

SEQ ID NO: 259 - DNA, 962 bp, Oryza sativa
ggcttaaacaatggcgacgacagtggattggtgtggccgtggcagcaatcttcctgctgcgatgtatgacatggtggtggatagcaaggagctaatgggcgcgcttgctccgtccatggtgtccttctcctacccgtgttccgagcagagcgcgagctcgcttcttgctggcgccaactacctgactcccgcgcaggtgctccatgtccaggcgcagctacagcgcctgcgccgcccgggcgcggcgagcggctgcctcgccgcggcgccgccgctgccgatgaagcggcatggcgcggtggcggtggcggcggcggcggcggcgcgggcgccggtcaagctgtaccgcggcgtcaggcagcggcattggggcaagtgggtggcggagatccgcctgccgcgcaaccgcacccgcctctggctgggcaccttcgacaccgccgaggaggccgcgctggcgtacgacagcgccgcgttccgcctccgcggcgagtccgcgaggctcaacttccccgagctccgccgcggcggcgcccacctcggcccgccgctccacgccgcggtcgacgccaagctccacgccatctgccacgggatggacctgccccaaccccaaccccaaacccagagcaatgcgacgacgacgacgatgtcgacgacggcgacgaacaccccaagccccttcttctcctcggagagcccggtggtcaagagcgagcccgtctgctccgcctccgagagctcttcctcggccgacggcgacgtgtcatcgacgggctcctccgacgtcgtcccggagatgcagctgctcgacttctcggaggcgccatgggacgagtccgagagcttcctgctgcacaagtacccgtcgctggagatcgactgggacgcgatcctttcctgatgcagtggctgaatcttcttcctctccctgttcttgaacccagctttcttgtacaaag

SEQ ID NO: 260 - protein, 297 aa, Oryza sativa
MATTVDWCGRGSNLPAAMYDMVVDSKELMGALAPSMVSFSYPCSEQSASSLLAGANYLTPAQVLHVQAQLQRLRRPGAASGCLAAAPPLPMKRHGAVAVAAAAAARAPVKLYRGVRQRHWGKWVAEIRLPRNRTRLWLGTFDTAEEAALAYDSAAFRLRGESARLNFPELRRGGAHLGPPLHAAVDAKLHAICHGMDLPQPQPQTQSNATTTTMSTTATNTPSPFFSSESPVVKSEPVCSASESSSSADGDVSSTGSSDVVPEMQLLDFSEAPWDESESFLLHKYPSLEIDWDAILS

SEQ ID NO: 261 - DNA, 894 bp, Oryza sativa
atggcgacgacagtggattggtgtggccgtggcagcaatcttcctgctgcgatgtatgacatggtggtggatagcaaggagctaatgggcgcgcttgctccgtccatggtgtccttctcctacccgtgttccgagcagagcgcgagctcgcttcttgctggcgccaactacctgactcccgcgcaggtgctccatgtccaggcgcagctacagcgcctgcgccgcccgggcgcggcgagcggctgcctcgccgcggcgccgccgctgccgatgaagcggcatggcgcggtggcggtggcggcggcggcggcggcgcgggcgccggtcaagctgtaccgcggcgtcaggcagcggcattggggcaagtgggtggcggagatccgcctgccgcgcaaccgcacccgcctctggctgggcaccttcgacaccgccgaggaggccgcgctggcgtacgacagcgccgcgttccgcctccgcggcgagtccgcgaggctcaacttccccgagctccgccgcggcggcgcccacctcggcccgccgctccacgccgcggtcgacgccaagctccacgccatctgccacgggatggacctgccccaaccccaaccccaaacccagagcaatgcgacgacgacgacgatgtcgacgacggcgacgaacaccccaagccccttcttctcctcggagagcccggtggtcaagagcgagcccgtctgctccgcctccgagagctcttcctcggccgacggcgacgtgtcatcgacgggctcctccgacgtcgtcccggagatgcagctgctcgacttctcggaggcgccatgggacgagtccgagagcttcctgctgcacaagtacccgtcgctggagatcgactgggacgcgatcctttcctga

SEQ ID NO: 262 - protein, 297 aa, Oryza sativa; identical to SEQ ID NO: 260

SEQ ID NO: 263 - DNA, 929 bp, Triticum aestivum
gctctcctcggcttcccttcctccaaatcgtcggcgtttcttgatcgacgagggcatggcgacgacggtggactggcgcagctataggcccgatcttcctgccgcgatgtatcacatggtggacagcagggaccaggtaatgcacgcgtttgctccggcgacggcgcagggcgcggctccgaccatctcgttcgccttcccctgccccggcgcggagcagagcgccggcctgcttcgtggcgccagctacctcactcccgcgcaaatcctccagctccagtcgcagctgcaccacgtgcgccgggcgccgggcgcggccatggccgcggtggggcagccgatgaagcggcacggcgtggcagcgctcccggcgcggccggcgaccaagctttaccgcggcgtaaggcagcggcattgggggaagtgggtcgccgagatccgcctgccccgcaaccgcacccgcctctggctcggcaccttcgacaccgccgacgaggccgcgctggcctacgacgccgccgccttccggctccgcggcgagtcctccaggctcaacttccccgagctcaggcgcggcggcgagcaccacggcccgccgctcgacgccgcgatcgacgccaagctccgctccatctgccacggggaagacatgccccagagccagagcgatgagacgccggcgccgacgacgacactgacgccgatttctttcccggacgtcaagagcgagccagtctgctccgtctccgagagctcgtcgtcggctgacggcgaggtgtcctcgtgctccgacgtcgtcccggagatgcagcttcttgatttctcggaggctccatgggacgagttcctgctgcgcaagtacccgtcgctcgagatcgactgggacgcgatcctttcttgaatcaagttcatgctcgatccacagctcg

SEQ ID NO: 264 - protein, 281 aa, Triticum aestivum
MATTVDWRSYRPDLPAAMYHMVDSRDQVMHAFAPATAQGAAPTISFAFPCPGAEQSAGLLRGASYLTPAQILQLQSQLHHVRRAPGAAMAAVGQPMKRHGVAALPARPATKLYRGVRQRHWGKWVAEIRLPRNRTRLWLGTFDTADEAALAYDAAAFRLRGESSRLNFPELRRGGEHHGPPLDAAIDAKLRSICHGEDMPQSQSDETPAPTTTLTPISFPDVKSEPVCSVSESSSSADGEVSSCSDVVPEMQLLDFSEAPWDEFLLRKYPSLEIDWDAILS

SEQ ID NO: 265 - DNA, 999 bp, Triticum aestivum
gctctcctcggcttctcttcctccaaatcgtcggcgtttcttgatcgacagggcatggcgacgacggtggactggcgcagctataggcccgatcttcctgcggcgatgtaccgcatggtggacagcagagaccaggtaatgcacgcgttcgctccgccgacggcgcagggcgcggctccgaccatctcgttcgccttcccatgccccggcgcggatcagagcgccggcctgcttcgtggcgccacctacctcactcccgcgcaaatcctccagctccagtcgcagctccaccacgtgcgccgggcgccgggcgcgcccatggccgcggtggggcagccgatgaagcggcacggcgtggcggcgctcccggcgcggccggcgaccaagctgtaccgcggcgtgcggcagcggcattgggggaagtgggtcgcggagatccgcctgccccgcaaccgcacccgcctctggctcggcaccttcgacaccgccgacgaggccgcgctggcctacgacgccgccgccttccggctccgcggcgagtccgccaggctcaacttccccgagctcaggcgcggcggcgagcaccacggcccgccgctcgatgccgcgatcgacgccaagctccgctccatctgccacggggaagacatgccgcagagccagagcaatgagacgccggcgccgacgccgacactgacgccgatttctttcccggacgtcaagagcgagccagtctgctccgtctccgagagctcttcgtcggctgacggcgaggtgtcctcgtgctccgacgtcgtcccggagatgcagcttcttgatttctcggaggctccatgggacgagtccctgctgcgcaagtacccgtcgctcgagatcgactgggacgcgatccttccttgaatcaagttcatgctcgatccacagctcgtccaaagtgattacttcggcttccacttaggctcgatcgagtatacgcgtgtagcatcaacccctccctgc

SEQ ID NO: 266 - protein, 281 aa, Triticum aestivum
MATTVDWRSYRPDLPAAMYRMVDSRDQVMHAFAPPTAQGAAPTISFAFPCPGADQSAGLLRGATYLTPAQILQLQSQLHHVRRAPGAPMAAVGQPMKRHGVAALPARPATKLYRGVRQRHWGKWVAEIRLPRNRTRLWLGTFDTADEAALAYDAAAFRLRGESARLNFPELRRGGEHHGPPLDAAIDAKLRSICHGEDMPQSQSNETPAPTPTLTPISFPDVKSEPVCSVSESSSSADGEVSSCSDVVPEMQLLDFSEAPWDESLLRKYPSLEIDWDAILP

SEQ ID NO: 267 - DNA, 847 bp, Triticum aestivum
tcctccagctccagtcgcagctccaccacgtgcgccgggcgccgggcgcggccatggcagtggcggggcagcccatgaagcggcacggcgttgcggcgctcccggcgcagccggcggccaagctgtaccgcggcgtgcggcagcggcattgggggaagtgggtcgccgagatccgcctgccccgcaaccgcacccgcctctggctcggcaccttcgacaccgccgacgaggccgcgctggcctacgacgccgccgccttccggctccgcggcgagtccgccaggctcaacttccccgagctcaggcgcggcggcgagcaccacggcccgccgctcgacgccgcgatcgacgccaagctccgctccatctgccacggggaggacctgccgcagagccagagcaatgcgacgccggcgccgacgccgaccctgacgccgagctctttcccggacgtcaagagcgagccaggctgctccgtctccgagagctcgtcgtcggccgacggcgaggtgtcctcgtgctccgacgtcgtcccggagatgcagcttcttgatttctcggaggctccatgggacgagtccctgctgcgcaagtacccgtcgctcgagatcgactgggacgcgatcctttcttgaaccgagttcatgcccgatccacagctcgttcaaagtgattgcttctgctttcgttaggctcttagataggttattatgggtttgatcaagtattcttgtgtaacatcaatccctgctctgcttggtttttgaatggcattgccaggaaggaggttttatgtagaaattttaagtatgtcatgtagtttgtgattcatttttttttttttttt

SEQ ID NO: 268 - protein, 193 aa, Triticum aestivum
MAVAGQPMKRHGVAALPAQPAAKLYRGVRQRHWGKWVAEIRLPRNRTRLWLGTFDTADEAALAYDAAAFRLRGESARLNFPELRRGGEHHGPPLDAAIDAKLRSICHGEDLPQSQSNATPAPTPTLTPSSFPDVKSEPGCSVSESSSSADGEVSSCSDVVPEMQLLDFSEAPWDESLLRKYPSLEIDWDAILS

SEQ ID NO: 269 - DNA, 1654 bp, Oryza sativa
tttttctcttctggattcttgccgatttttaggcttcctttgcttttctaaggccagaaagggttgttttgcaatacccttctagttcatcctctcaaatttttcttctttctattcaaaagctctttctttctttgcaccctttgtttctctacttttattgaggaacagggctgatttttcacttcttgcatccaaaaagcaccccttttttctttcctgtttttaagatttccatacccttgccatcttcatcttctacctccatccagtcctcatggccgcagcaatagacatgtacaagtataacactagcacacaccagatcgcatcctcggatcaggagctcatgaaagcgctcgaaccttttattaggagcgcttcttcttcctccgcttcctccccctgccaccactactactcttcttctccttccatgagccaagattcttacatgcccaccccatcttatcccacttcctctatcacaaccgccgccgccaccaccacctcgtctttctcgcagctacctccgctgtactcttcgcagtatcatgctgcttcacctgcggcgtcggcgacgaacgggccgatggggctgacccacctgggcccagcccagatccagcagatccaggcccagttcttggcccagcagcagcagcagagggccctggccggcgccttccttcggccgcgtggccagccgatgaagcagtccgggtcgccgccgcgcgcggggccgttcgcggcggtcgccggggcggcgcagtcgaagctctaccgcggagtgcggcagcgccactgggggaagtgggtggcggagatccgcctcccgaagaaccggacgcggctgtggctcggcaccttcgacaccgccgaggacgccgcgctcgcctacgacaaggccgccttccgcctccgcggcgacctcgcgcggctcaacttccccaccctccgccgcggcggcgcccacctcgccggcccgctccacgcctccgtcgacgccaagctcaccgccatctgccagtccctcgccacgagctcgtccaagaacacccccgccgagtcagcggcctccgcggcggagccggagtcccccaagtgctcggcgtcgacggaaggggaggactcggtgtccgccggctcccctcctccgcccacgccgctgtcgcccccggtgccggagatggagaagctggacttcacggaggcgccatgggacgagtcggagacattccacctgcgcaagtacccgtcctgggagatcgactgggactcaatcctctcataaacaagcagaagcagctactactagtctattactagtactagtagtagtcttcgtcaagctagagtcactcaactcaactagctgtgtaatcttctctgaattccgtggcttccatggctcggtggcattttagacgtcggccatggctgctgcgagtagcagtaactagtcagtactcagtagtagtaaggtcgttggtattacgtcgtcgtgcaagtgtcgttggtgtactcagtgatctgatctcctggttgagctgccggttgtttttttcacggcgcggccggtcgagaattaagctgtaatcccttgttacatgttggaaattcagtagcttatgtaactatatgtacctttctc

SEQ ID NO: 270 - protein, 338 aa, Oryza sativa
MAAAIDMYKYNTSTHQIASSDQELMKALEPFIRSASSSSASSPCHHYYSSSPSMSQDSYMPTPSYPTSSITTAAATTTSSFSQLPPLYSSQYHAASPAASATNGPMGLTHLGPAQIQQIQAQFLAQQQQQRALAGAFLRPRGQPMKQSGSPPRAGPFAAVAGAAQSKLYRGVRQRHWGKWVAEIRLPKNRTRLWLGTFDTAEDAALAYDKAAFRLRGDLARLNFPTLRRGGAHLAGPLHASVDAKLTAICQSLATSSSKNTPAESAASAAEPESPKCSASTEGEDSVSAGSPPPPTPLSPPVPEMEKLDFTEAPWDESETFHLRKYPSWEIDWDSILS

SEQ ID NO: 271 - DNA, 834 bp, Arabidopsis thaliana
atggctttaaacatgaatgcttacgtagacgagttcatggaagctcttgaaccattcatgaaggtaacttcatcttcttctacttcgaattcatcaaatccaaaaccattaactcctaatttcatccctaataatgaccaagtcttaccggtatctaaccaaaccggtccgattgggctaaaccagctcactccaacacaaatcctccaaattcagacagagttacatctccggcaaaaccaatctcgtcgtcgcgctggtagtcatcttctcaccgctaaaccaacctcaatgaagaaaatcgacgtagcaactaaaccggttaaactataccgaggcgtaagacagaggcaatggggtaaatgggtagctgagattcggctacctaaaaaccgaacccggttatggctcggtacgttcgaaacggctcaagaagctgcattagcttacgatcaagcagctcataagatcagaggagacaacgctcgtctcaatttcccagacattgttcgtcaaggacactataaacagatattgtctccgtctatcaacgcaaagatcgaatccatctgcaatagttctgatcttccactgcctcagatcgagaaacagaacaaaacagaggaggtgctctctggtttttccaaaccggagaaagaaccggaatttggggagatatacggatgcggatactcgggctcatctcctgagtcggatataacgttgttggatttctcaagcgactgtgtgaaagaagatgagagtttcttgatgggtttgcacaagtatccttctttggagattgattgggacgctatagagaaactcttcgga

SEQ ID NO: 272 - protein, 278 aa, Arabidopsis thaliana
MALNMNAYVDEFMEALEPFMKVTSSSSTSNSSNPKPLTPNFIPNNDQVLPVSNQTGPIGLNQLTPTQILQIQTELHLRQNQSRRRAGSHLLTAKPTSMKKIDVATKPVKLYRGVRQRQWGKWVAEIRLPKNRTRLWLGTFETAQEAALAYDQAAHKIRGDNARLNFPDIVRQGHYKQILSPSINAKIESICNSSDLPLPQIEKQNKTEEVLSGFSKPEKEPEFGEIYGCGYSGSSPESDITLLDFSSDCVKEDESFLMGLHKYPSLEIDWDAIEKLFG

SEQ ID NO: 273 - DNA, 1083 bp, Oryza sativa
atggcggccatagatttgtacaagtatcagctgagctcctcgtcctcgtcttcttcctcggatcaggagctcatgaaagcgctcgaaccttttatcaggagcgcttcacccacctccacctccacctccacgccattgttctactcctctagctccatctccaccaccaccaccactcccttctcctactcgtctccattgccgcaagaatcgtactacctccctgcttcttcgtcctacgccgccattgttccacctccgacgacgacgacgaacaccaccacctccttctcggagctccctcccctgcctccctcctcctcgtcgttcgcctcgccggcgaatgctgcggcggtggggctggctcaccttggcccggagcagatccagcagattcaggtgcagttcttgatgcagcagcagctgcagcagcgggggatggcggcgtcggcgtcggcgtcggcggcggcgtcgtaccttggcccgcgggcgcagcccatgaagcaggccggggcggcggcggcggcggcggccggcggcaagatgtaccgcggcgtgcggcagcggcactgggggaagtgggtggcggagatccggctgccgaagaaccggacgcggctgtggctgggcacgttcgacaccgccgaggacgcggcgctcgcctacgacaaggcggcgttccgcctccgcggcgacgccgcgcgcctcaacttccccacgctccgccgcggcggcgcccacctcgccggcccgctccacgcctccatcgacgccaagctcaccgccatctgccacagcctcgccgccgcgccgcccgcctcctccaagaaagccgccgccgccgccgctcacccggactcgcccaaaggctccgcgtcgacgacgaccacgacgtcggagggagacgagtcggcgatctccgcctgttcgcctcctctcccgccgccgccaccgccgccgccggcggcgctccccgagatggcaaaccttgacttcacggaggcgccatgggacgaatccgacgccttccacctctacaagtgtccgtcatgggagatcgactgggactccatcctctcgtga

SEQ ID NO: 274 - protein, 360 aa, Oryza sativa
MAAIDLYKYQLSSSSSSSSSDQELMKALEPFIRSASPTSTSTSTPLFYSSSSISTTTTTPFSYSSPLPQESYYLPASSSYAAIVPPPTTTTNTTTSFSELPPLPPSSSSFASPANAAAVGLAHLGPEQIQQIQVQFLMQQQLQQRGMAASASASAAASYLGPRAQPMKQAGAAAAAAAGGKMYRGVRQRHWGKWVAEIRLPKNRTRLWLGTFDTAEDAALAYDKAAFRLRGDAARLNFPTLRRGGAHLAGPLHASIDAKLTAICHSLAAAPPASSKKAAAAAAHPDSPKGSASTTTTTSEGDESAISACSPPLPPPPPPPPAALPEMANLDFTEAPWDESDAFHLYKCPSWEIDWDSILS

SEQ ID NO: 275 - DNA, 1076 bp, Asparagus officinalis
ccacctttgatcactcctcgccatcaaactccagtcttttgagcatggaccagcctgatctgagccaagttgggccagttgggctgacccaactgagcccacttcaaatccagcagatccaagctcaaatccagctcaaccaccaacaccagctaatggtctccagaaccctgcaagctagaaattaccataacaccctcggtgtaaagccccagcccatgaagctccaggcctcggtcgctgcacctcagtcaaaacccacgaagctctacagaggggtgaggcaaaggcactggggtaaatgggttgcagagatcagactgccgaagaatcgaaccaggctttggcttggaacctttgacactgctgaagaagctgccttggcctatgacaaggctgcttacaaattgagaggggactacgcgaggctcaatttccctaacctgaagcatacccatctggctggcaaccctctgcactcgtctgttgatgccaagctcgaagcaatttgccagaccctggagagccctgggaagaagaaggttagcaccgggtcgaagcctgagccggttgtttcatcgccgactgttgagaccgaggaggagtcttcctcttcttcttcggtgacgggggcgacgaattctccggtttcagagatcgagagcttggatttcaatgaggtgccgtgggatgagactgaggactttgtgttgaggaaatacccatcctatgagattgattgggattctatattgtcttcagcttagtagtgtctggtttgtgcttgttgttgttagatttgggggtctttagtggctgttgcaaatggagtttttggcatttgcgtagccttgttcagggatttttagtttagtttatttttttttctttcttttagagtgtaagaactcatggcctctgctgattatttttgcttggcgaggccgttgaggggttaagtgtactactattgtcagttccaggtgtaactcttctctgttgcagctttgtaagtatgagtgtatcttgtgtttaattaaggtatatttgtagcttttgaaaaaaaaaaaaaaaaa

SEQ ID NO: 276 - protein, 240 aa, Asparagus officinalis
MDQPDLSQVGPVGLTQLSPLQIQQIQAQIQLNHQHQLMVSRTLQARNYHNTLGVKPQPMKLQASVAAPQSKPTKLYRGVRQRHWGKWVAEIRLPKNRTRLWLGTFDTAEEAALAYDKAAYKLRGDYARLNFPNLKHTHLAGNPLHSSVDAKLEAICQTLESPGKKKVSTGSKPEPVVSSPTVETEEESSSSSSVTGATNSPVSEIESLDFNEVPWDETEDFVLRKYPSYEIDWDSILSSA

SEQ ID NO: 277 - DNA, 1013 bp, Aloe vera
aaatccaatctttcgaccgccgacctgagccagctgtgcccgataggtttgaatcacctgagctcgctccagatccaacaaattcaagcccagatccagctcaaccagcagcagcagctcatgatatcgagagccatgcaagcaaggaactataacctcggggtgagatctcagcccatgaagctcgccgccgctgcagcgccgcctcagccgaagccgacgaagctctacaggggcgtgaggcagcggcactggggcaagtgggtggccgagatcagactaccgaagaacaggacaaggctctggctcggcacttttgacacagccgaggaggccgccttggcctacgacaaggccgcctacaagctgaggggggactacgccaggctcaacttcccccacctgaagcacaccggtgcccacctggctcccggcggccccctgcactcctctgtggacgccaagctgcaggccatctgccagagcttggagcagaataagagctcaaactcaaactcatcaaagaaagagaagaggggggatgcagtagaagaaaaatctgacaaggtggtggttgttgttgccgagggcgaggagtcttgctcatcttcttcgatgaacacggggagtgcgagctcgccatcgtcggagatagagagcctggacttcacggaggtgccatgggatgagtctgaggactttgtgctgaggaaatacccttcatgggagattgattgggatgctatactgtcttaatgttttggtagtcgttgtgttttgtggtttgtttctagggtttttagtcgttggtggctggttgcaaatggagtttttggcatttgcacagccttttagagctcaaggtctttgctggttattttttcttggcaaaggactgggtggggggagtagttctgtttcagatttcaggttgttgttattgtcatctttgtagtagctttgtattataatcagtttatttgtgttccagttcttaaaaaaaaaaaaaaaaa

SEQ ID NO: 278 - protein, 211 aa, Aloe vera
MISRAMQARNYNLGVRSQPMKLAAAAAPPQPKPTKLYRGVRQRHWGKWVAEIRLPKNRTRLWLGTFDTAEEAALAYDKAAYKLRGDYARLNFPHLKHTGAHLAPGGPLHSSVDAKLQAICQSLEQNKSSNSNSSKKEKRGDAVEEKSDKVVVVVAEGEESCSSSSMNTGSASSPSSEIESLDFTEVPWDESEDFVLRKYPSWEIDWDAILS

SEQ ID NO: 279 - DNA, 1493 bp, Gossypium hirsutum
acctcttttaatccgttctggatttaggacctgttcttcaagttttggtaagaaacaggttaattttttattaaaatttggtcctcatcttatttctagttttagtgtaatggcagctgcaatggatttcattagtattggagtagatcaatcagatctatatgggggagaattgatggaagctctcgaaccttttatgaaaagtgtttcctcctcttccccttccccttccccttccccttccccttcttctcttccttctacttcttacctttctttctcttcttccgaaacacaacctaatttttacccagatagctgttgttacccttaccctacaccaatggactcagtatcatgtccccaacagcctcaaactggttcaacaattgggctaaatagcttgacacaagctcagatccatcagatccagcttcaattccacctccacaacaaccaaccaagctacctttgccaaagtccccaacccaacaccatcagcgccaatagtaacccgatggttagctttctttgccctaaacctgtcccaatgaaacacgtgggtgcgccatccaaacccaccaaactttacagaggagttaggcaacgccactggggaaaatgggtcgctgagatccggttacctagaaaccggacacgtctttggttaggcacttttgacactgctgaggaagcagccttggcttatgacaaagcagcttataaactaagaggtgactttgcgagactcaacttccctaaccttcgtcaccacggttcccacgtaggtgactacaagcctttgccttcctctgttgacgctaagcttcaagccatttgtgagagcttggtacaaaaccctaagcaagggagcaagaagaaatcatccaaggttacggcagacaccaaaagcaggaacaacaaaaaatccgacatggcagagccaaagcccgaggagaatacagcgaaagtggagaactcctcatctttgtctacggttcaatccgagagtgagggttcggctgtatcttcacctttatcagatcttacattctcggatttcgacgaacaaccatggccggaagtcgtttcttcttcggaaacttttatgttgtccaagtacccttcagagatcgattgggattccattctaaaagcctgaagggaaaaacccaagtttcgttttctgtgtaacagtcttttgttgtttaggagtttcctttcgtgtatttttttttgtaaagctagctgcaatggagtttttggcagttgcagtggcatgtattttaggttattaagagtctgttaatgagtgtaagtgcttgtgttcataagaatttgtgattttctccatgctggtcagctcgtttttttacttgctgaaccaaaaggtgaaatttgttagtgtctataaaaaaagtttatagcttttgtattttgtacgaattaaatgttatttatgttgttgtattctctggtatcgtgttttcttc

SEQ ID NO: 280 - protein, 350 aa, Gossypium hirsutum
MAAAMDFISIGVDQSDLYGGELMEALEPFMKSVSSSSPSPSPSPSPSSLPSTSYLSFSSSETQPNFYPDSCCYPYPTPMDSVSCPQQPQTGSTIGLNSLTQAQIHQIQLQFHLHNNQPSYLCQSPQPNTISANSNPMVSFLCPKPVPMKHVGAPSKPTKLYRGVRQRHWGKWVAEIRLPRNRTRLWLGTFDTAEEAALAYDKAAYKLRGDFARLNFPNLRHHGSHVGDYKPLPSSVDAKLQAICESLVQNPKQGSKKKSSKVTADTKSRNNKKSDMAEPKPEENTAKVENSSSLSTVQSESEGSAVSSPLSDLTFSDFDEQPWPEVVSSSETFMLSKYPSEIDWDSILKA

SEQ ID NO: 281 - DNA, 993 bp, Arabidopsis thaliana
atgaatttgtacacttgtagcagatcgtttcaagactctggtggtgaactcatggacgcgcttgtaccttttatcaaaagcgtttccgattctccttcttcttcttctgcagcgtctgcgtctgcgtttcttcacccctctgcgttttctctccctcctctccccggttattacccggattcaacgttcttgacccaaccgttttcatacgggtcggatcttcaacaaaccgggtcattaatcggactcaacaacctctcttcttctcagatccaccagatccagtctcagatccatcatcctcttcctccgacgcatcacaacaacaacaactctttctcgaatcttctcagcccaaagccgttactgatgaagcaatctggagtcgctggatcttgtttcgcttacggttcaggtgttccttcgaagccgacgaagctttacagaggtgtgaggcaacgtcactggggaaaatgggtggctgagatccgtttgccgagaaatcggactcgtctctggcttgggacttttgacacggcggaggaagctgcgttggcctatgataaggcggcgtacaagctgcgcggcgatttcgcccggcttaacttccctaacctacgtcataacggatctcacatcggaggcgatttcggtgaatataaacctcttcactcctcagtcgacgctaagcttgaagctatttgtaaaagcatggcggagactcagaaacaggacaaatcgacgaaatcatcgaagaaacgtgagaagaaggtttcgtcgccagatctatcggagaaagtgaaggcggaggagaattcggtttcgatcggtggatctccaccggtgacggagtttgaagagtccaccgctggatcttcgccgttgtcggacttgacgttcgctgacccggaggagccgccgcagtggaacgagacgttctcgttggagaagtatccgtcgtacgagatcgattgggattcgattctagcttag

SEQ ID NO: 282 - protein, 330 aa, Arabidopsis thaliana
MNLYTCSRSFQDSGGELMDALVPFIKSVSDSPSSSSAASASAFLHPSAFSLPPLPGYYPDSTFLTQPFSYGSDLQQTGSLIGLNNLSSSQIHQIQSQIHHPLPPTHHNNNNSFSNLLSPKPLLMKQSGVAGSCFAYGSGVPSKPTKLYRGVRQRHWGKWVAEIRLPRNRTRLWLGTFDTAEEAALAYDKAAYKLRGDFARLNFPNLRHNGSHIGGDFGEYKPLHSSVDAKLEAICKSMAETQKQDKSTKSSKKREKKVSSPDLSEKVKAEENSVSIGGSPPVTEFEESTAGSSPLSDLTFADPEEPPQWNETFSLEKYPSYEIDWDSILA

SEQ ID NO: 283 - DNA, 1825 bp, Arabidopsis thaliana
atcggtgaggttgagagtaattcactacacacacacaaaaaataaattgagtgcctcccccaaaaacaaaattggtagataacgagcaattgttttttttcagatttgatcctgaatttttacatttttttttttgcaatctccccctaatctgttgtttctcgcttcttcttctgttaatcatctgtctttcaaaaagaaagaaaaaagaaaaattcgatttctgggtttgtttttgtcatacagaaaaaaatcaagcttatgaatttgtgtttaattttttgttttaatttgaaaggcaggttttttcagaacgagatcgttttttcaaatttcttctgattttacctctttttttcttcttagattttagtgaatcgagggtgaaatttttgattccctcttttcggatctacacagaggttgcttatttcaaaccttttagatccatttttttttaattttctcggaaaaatccctgtttctttacttttttataagtctcaggttcaattttttcggattcaaatttttattttaaatggcagctgctatgaatttgtacacttgtagcagatcgtttcaagactctggtggtgaactcatggacgcgcttgtaccttttatcaaaagcgtttccgattctccttcttcttcttctgcagcgtctgcgtctgcgtttcttcacccctctgcgttttctctccctcctctccccggttattacccggattcaacgttcttgacccaaccgttttcatacgggtcggatcttcaacaaaccgggtcattaatcggactcaacaacctctcttcttctcagatccaccagatccagtctcagatccatcatcctcttcctccgacgcatcacaacaacaacaactctttctcgaatcttctcagcccaaagccgttactgatgaagcaatctggagtcgctggatcttgtttcgcttacggttcaggtgttccttcgaagccgacgaagctttacagaggtgtgaggcaacgtcactggggaaaatgggtggctgagatccgtttgccgagaaatcggactcgtctctggcttgggacttttgacacggcggaggaagctgcgttggcctatgataaggcggcgtacaagctgcgcggcgatttcgcccggcttaacttccctaacctacgtcataacggatctcacatcggaggcgatttcggtgaatataaacctcttcactcctcagtcgacgctaagcttgaagctatttgtaaaagcatggcggagactcagaaacaggacaaatcgacgaaatcatcgaagaaacgtgagaagaaggtttcgtcgccagatctatcggagaaagtgaaggcggaggagaattcggtttcgatcggtggatctccaccggtgacggagtttgaagagtccaccgctggatcttcgccgttgtcggacttgacgttcgctgacccggaggagccgccgcagtggaacgagacgttctcgttggagaagtatccgtcgtacgagatcgattgggattcgattctagcttaggggcaaaataggaaattcagccgcttgcaatggagtttttgtgaaattgcatgactggcccaagagtaattaattaaatatggattagtgttaaatttcgtatgttaatatttgtattatggtttgtattagtctctctgtgtcggtccagcttgcggttttttgtcaggctcgaccatgccacagttttcattttatgtaatctttttttcttttgtcttatgtaatttgtagcttcagtttcttcatctataatgcaattttattatgattatgtaa

SEQ ID NO: 284 - protein, 334 aa, Arabidopsis thaliana
MAAAMNLYTCSRSFQDSGGELMDALVPFIKSVSDSPSSSSAASASAFLHPSAFSLPPLPGYYPDSTFLTQPFSYGSDLQQTGSLIGLNNLSSSQIHQIQSQIHHPLPPTHHNNNNSFSNLLSPKPLLMKQSGVAGSCFAYGSGVPSKPTKLYRGVRQRHWGKWVAEIRLPRNRTRLWLGTFDTAEEAALAYDKAAYKLRGDFARLNFPNLRHNGSHIGGDFGEYKPLHSSVDAKLEAICKSMAETQKQDKSTKSSKKREKKVSSPDLSEKVKAEENSVSIGGSPPVTEFEESTAGSSPLSDLTFADPEEPPQWNETFSLEKYPSYEIDWDSILA

SEQ ID NO: 285 - DNA, 1224 bp, Arabidopsis thaliana
aaaaaacaaatatttagaaacaaaaaatgctataattcttcctttttcttgttctttcagagattttgatttctattcaatcgactaagagggtgtgtttttaatccctctctgttttaattttgtttcctagtctttaaagatccatggcagccatagatatgttcaatagcaacacagatccttttcaagaagagctcatgaaagcacttcaaccttataccaccaacactgattcttcttctcctacgtattcaaacacagtcttcggtttcaatcaaaccacatctctcggtctaaaccagctcacaccttaccaaatccaccaaatccaaaaccagcttaaccagagacgtaacataatctctccaaatctagccccaaagcctgtcccaatgaagaacatgaccgctcagaaactctatagaggagttagacaaaggcactggggaaaatgggtagctgagatccgtttacccaagaaccggacccgactctggcttggaactttcgacacagctgaagaagcagccatggcttatgacctagctgcttacaagctaagaggcgagttcgcgagacttaatttcccacagttcagacacgaggatggatactacggaggaggtagctgtttcaatcctcttcattcctctgtcgacgcaaagctccaagagatttgtcagagcttgagaaaaacagaggatattgacctcccctgttctgaaacagagcttttcccgccaaaaacagagtatcaagaaagtgaatatgggttcttgagatctgatgagaattcgttttcagatgagtctcatgtggaatcttcttcgccggaatctggtattactacgttcttggacttttcggattctggatttgatgagattgggagtttcgggctggagaagtttccttctgtggagattgattgggatgcgattagcaaattgtccgaatcttaaacaaagcaaagagaagactttttcttttaggagtttgtctttcaatttcagtgtcttatattaatctctctgcaactgaaatttttaacagttgcggagagaatcgtctctagggtttgtttctcttcctccatgttttggtctgactggttaatgtcttttttttttttttgaactttcaaaaacctttgtcattgaccaatcggagaagtttccatgtattctctcatctttaaatttctaatgaagaatgtaaatt

SEQ ID NO: 286 - protein, 272 aa, Arabidopsis thaliana
MAAIDMFNSNTDPFQEELMKALQPYTTNTDSSSPTYSNTVFGFNQTTSLGLNQLTPYQIHQIQNQLNQRRNIISPNLAPKPVPMKNMTAQKLYRGVRQRHWGKWVAEIRLPKNRTRLWLGTFDTAEEAAMAYDLAAYKLRGEFARLNFPQFRHEDGYYGGGSCFNPLHSSVDAKLQEICQSLRKTEDIDLPCSETELFPPKTEYQESEYGFLRSDENSFSDESHVESSSPESGITTFLDFSDSGFDEIGSFGLEKFPSVEIDWDAISKLSES

SEQ ID NO: 287 - DNA, 966 bp, Oryza sativa
atggatcgccaatggcgttgcctcgctgctgcggcttctactagtggtaatagtaagcttcctccgctgccgatggcgctgggcggcgccgtggagtacgggcagctcgtccatggcgcggcggcgcccgtggcgccgttcttcgtggacgccgagcagcagagcctgtcgccggcgacggccatggttcttggcgccgggtggtataactataaccttgtcacgccgtcgcaggcggcgcagctgcaccaccggctgcgacgggcggtgggcgcggcgccgtgctcgatgaagcggtgcggtggcatggcggcggcggcggcggggcggcttgcgctggtggggccggcgccggtgcaggcgaagctgtaccgcggcgtgcggcagcggcactgggggaaatgggtggcggagatccggctgccgcggaaccggacgcggctgtggctgggcacgtacgacaccgccgaggacgccgcgctcgcctacgacggtgccgcgttccggctgcgcggcgacgccgcccgcctcaacttccccgagctccggcgcggagggcggcaccacgcgccggcgctcagcgcgtccgtcgacgccaagatcctccaagccaccaccaccaccacggcggacaccgccgccgccgcagcaccggcgtcgacgaacaccacgccgccgccgtcgccgcgcgtcgtcaagaccgagccgggctgctgctccgtctccgaagcctccacgacgacgacggccgacgccgccgacgtctcgtccacagggtcttccccatccccgacctcatcgaatcaggccgccaccgccacgccgccggcgccgcggccgccgccgccgttgccggagacgattcagcagctggacttcacggaggcgccatgggacgaggccgacggcttcgcgctgcgccggtatccgtcgtgggagatcgactgggacgccatcctctcctga

SEQ ID NO: 288 - protein, 321 aa, Oryza sativa
MDRQWRCLAAAASTSGNSKLPPLPMALGGAVEYGQLVHGAAAPVAPFFVDAEQQSLSPATAMVLGAGWYNYNLVTPSQAAQLHHRLRRAVGAAPCSMKRCGGMAAAAAGRLALVGPAPVQAKLYRGVRQRHWGKWVAEIRLPRNRTRLWLGTYDTAEDAALAYDGAAFRLRGDAARLNFPELRRGGRHHAPALSASVDAKILQATTTTTADTAAAAAPASTNTTPPPSPRVVKTEPGCCSVSEASTTTTADAADVSSTGSSPSPTSSNQAATATPPAPRPPPPLPETIQQLDFTEAPWDEADGFALRRYPSWEIDWDAILS

SEQ ID NO: 289 - DNA, 1384 bp, Broussonetia papyrifera
caccacaccagttttctctgatccctttagagaagagctcatgaaagcacttgaaccttttatgaaaagtgctcataataatatcaacaacaacatttcaccaatctcttcttcttcctcttcttcttacctttctagtgagcccaacttttaccctgaatctgaaacttgctcaccttcaactacccaaatgttttccagtgggttgttctccagctttaaccacatgggttctgagcagactggttctttaggcttaaaccagctcacccaatcccagattctccaaattcaagcccaaatctacttccaacaacaacagcaacagcaacaaaatctactcatgaccaccataactccgccccaaaacagcctcaactacctcggtccgagggcggttccgatgaagaacgtcggcgccaattcaaagcccaacaaactctacagaggagtgaggcagaggcattggggcaaatgggtcgccgagatcagactccccaagaaccggacccgcctctggctgggcaccttcgacaccgccgaggaagccgccttggcctacgacaaggcggcgtacaagctccgcggggacttcgcccgcctcaacttcccccacctccgccacgaaggcgcccacgtctctggcgagttcggcgagtacaagcccctccattcctccgtcgacgccaagcttcaggcgatttgccaaagcctggcgaattcgcagaagcaggggagtgccaaggaggcttgttccgagccggaggtgaagccagtcatcgagcccaagatggcgtccgataattctccgaaaggcgaattggaggtgtcgtcttcgtcgttgtcgtcgtcgtcgtcgttgtcgttgtcgttgtcgttgtcgtcgccgttgtcggatgagtcttcggcggggtcatcctcgccggagtccgatgtcacgttgttggacttctcggattctcattgggatgggaatgagaattttgggctagggaagtacccttcagtggagatcgactgggatgctctgtgatcgtaataaatgttggttatgttgtcattttctcttttttatttttcctgcgttattagttgtttttaaggtttttttttttagttgtacaagcacggcttctgcgatggaatttttaacatggcaggggtttagctcagttttttaaatttaggaagggtcagtaagtcagtcagtcagtcagatgtttttatgttgtaatatttgatgtcgtttgatatctcctatgttggtcagctggtagtttttttccttgctaggcctggccatgggagatctctctgggttgtatttactactttttgaatgtaattaggcaagtctactttatataaaaaaaaaaaaaaaaaa

SEQ ID NO: 290 - protein, 330 aa, Broussonetia papyrifera
MKALEPFMKSAHNNINNNISPISSSSSSSYLSSEPNFYPESETCSPSTTQMFSSGLFSSFNHMGSEQTGSLGLNQLTQSQILQIQAQIYFQQQQQQQQNLLMTTITPPQNSLNYLGPRAVPMKNVGANSKPNKLYRGVRQRHWGKWVAEIRLPKNRTRLWLGTFDTAEEAALAYDKAAYKLRGDFARLNFPHLRHEGAHVSGEFGEYKPLHSSVDAKLQAICQSLANSQKQGSAKEACSEPEVKPVIEPKMASDNSPKGELEVSSSSLSSSSSLSLSLSLSSPLSDESSAGSSSPESDVTLLDFSDSHWDGNENFGLGKYPSVEIDWDAL

SEQ ID NO: 291 - DNA, 993 bp, Jatropha curcas
ggactcagatagttgctccacatcgactgcccttccattttcaaatgggttctcgatccaagaccccaaccgtcttcagcaacctacttgttcaatcgggctatgtcttactccaacccagatccaccagatccagacccaaatccattaccagaatcaaaatggattcaatttccagaatttccacacccaaaaccaacatggcttaactttttaggtccgaaacccgtgcccatgaagcaggtgggttcaccaccaaaacccactaagctctacagaggagtaaggcagcgacattggggcaaatgggttgccgagatccgactacccaagaaccgtacacgactctggcttggtacttttgacacagcagaagaagccgctttagcttatgacaaagcggcgtacaaactccgtggcgacttcgcgagacttaacttccctaacctccgccaccaagggtcccacattgaaggcagcttcggcgagtataagcctctccattcctcggtcgatgcgaaactgcaagctatttgtcaaagcttagcagaatcgcagaaacaaggaggaaaagcagagaagcaatcaaactcgtcagcgaaaaagaagacttcggtggggactactccagcgacggcggagaaggttaaggaagctaaggcaccgcaacaggttgttccggacaagtgttgcaaggtcgagacaccatcgtcagtgttgacagaaagtgaagcctctggcggatcttcaccgttgtcggatcttacgtttccggatctagaagaggcaccattggatgttgattctggaaattttaatttggagaagtacccatcttatgaaattgattgggcttctcttttatcttcttagatttggttatgttatgttatttatcttttatctttattttgcagttatgtttagttcttaggcgtgtggttgctgcaatgagtttttggcagttgcagagccaaaaaaaaaaaaaaaaaa

SEQ ID NO: 292 - protein, 256 aa, Jatropha curcas
MSYSNPDPPDPDPNPLPESKWIQFPEFPHPKPTWLNFLGPKPVPMKQVGSPPKPTKLYRGVRQRHWGKWVAEIRLPKNRTRLWLGTFDTAEEAALAYDKAAYKLRGDFARLNFPNLRHQGSHIEGSFGEYKPLHSSVDAKLQAICQSLAESQKQGGKAEKQSNSSAKKKTSVGTTPATAEKVKEAKAPQQVVPDKCCKVETPSSVLTESEASGGSSPLSDLTFPDLEEAPLDVDSGNFNLEKYPSYEIDWASLLSS

SEQ ID NO: 293 - DNA, 969 bp, Arabidopsis thaliana
tcttcctccgacgcatcacaacaacaacaactctttctcgaatcttctcagcccaaagccgttactgatgaagcaatctggagtcgctggatcttgtttcgcttacggttcaggtgttccttcgaagccgacgaagctttacagaggtgtgaggcaacgtcactggggaaaatgggtggctgagatccgtttgccgagaaatcggactcgtctctggcttgggacttttgacacggcggaggaagctgcgttggcctatgataaggcggcgtacaagctgcgcggcgatttcgcccggcttaacttccctaacctacgtcataacggatttcacatcggaggcgatttcggtgaatataaacctcttcactcctcagtcgacgctaagcttgaagctatttgtaaaagcatggcggagactcagaaacaggacaaatcgacgaaatcatcgaagaaacgtgagaagaaggtttcgtcgccagatctatcggagaaagtgaaggcggaggagaattcggtttcgatcggtggatctccaccggtgacggagtttgaagagtccaccgctggatcttcgccgttgtcggacttgacgttcgctgacccggaggagccgccgcagtggaacgagacgttctcgttggagaagtatccgtcgtacgagatcgattgggattcgattctagcttaggggcaaaataggaaattcagccgcttgcaatggagtttttgtgaaattgcatgactggcccaagagtaattaattaaatatggattagtgttaaatttcgtatgttaatatttgtattatggtttgtattagtctctctgtgtcggtccagcttgcggttttttgtcaggctcgaccatgccacagttttcattttatgtaatctttttttcttttgtcttatgtaatttgtagcttcagtttcttcatctataatgcaattttattatgattatgtg

SEQ ID NO: 294 - protein, 229 aa, Arabidopsis thaliana
LPPTHHNNNNSFSNLLSPKPLLMKQSGVAGSCFAYGSGVPSKPTKLYRGVRQRHWGKWVAEIRLPRNRTRLWLGTFDTAEEAALAYDKAAYKLRGDFARLNFPNLRHNGFHIGGDFGEYKPLHSSVDAKLEAICKSMAETQKQDKSTKSSKKREKKVSSPDLSEKVKAEENSVSIGGSPPVTEFEESTAGSSPLSDLTFADPEEPPQWNETFSLEKYPSYEIDWDSILA

SEQ ID NO: 295 - DNA, 1407 bp, Oryza sativa
cttggttaggttgcttgcagagagcgagagacccagggccttttagatccagggctcccagatctgctgtttttctttcatcttctttgtgttctagtgttaggttggtagccaagaggggttctttttccacacctcacttgctagatctaccaccaaaaagccatctgtttttttactgtggctgtcgatttctccctccttcctgcctgttcttgattttggattcggaaccaggcaaatctttgttactactgttttagtatcagaaaaaaaaatcccaaaaaaaagagtgagtagatggctgcagctatagatctgtcaggggaggagctgatgagagcactcgagccttttatccgagatgcctccggctcgcctccggtttgttcccagtttagtcccacctcgccattctccttcccgcacgcgttcgcgtacggtggcgggctggcccagcagccagagctcagcccggcccagatgcactacatccaggcccgcctccacctccagcggcaggcggcgcaggccggcccgctcggcccgcgcgcgcagccgatgaaggcgtcgtcgtcgtcggcttcggcggcgggggcggcggcgacgccgccgcggccgcagaagctgtaccgcggcgtgcggcagcggcactgggggaagtgggtggcggagatccgcctcccgcggaaccgcacgcggctctggctcggcaccttcgacacagccgaggaggcggcgcttgcctacgaccaggcggcgtaccgcctccgcggcgacgcggcgcggctcaacttccccgacaacgccgcctcccgcggcccgctccacgcctccgtcgacgccaagctccagacgctctgccagaacatcgccgccgccaagaacgccaagaagtcctctgtctccgcctccgccgccgcaacatcctccgcgcccaccagcaactgctcgtcgccgtcctccgacgacgcgtcgtcctgcctggagtccgccgactcgtcgccctccctgtcgccgtcctccgccgccaccacggccgagacgccggcgaccgtgccggagatgcagcagctcgacttcagcgaggcgccgtgggacgaggccgccgccttcgccctcaccaagtacccgtcctacgagatcgactgggactccctcctcgccgccaattaacaccaccaccacttcttggctagtactcacgccgtcgttagcctaatcgtcgccgccgccgccgccgtgcagatgggattttagacattctgcaccgcacggacgggcatggattagcagttttatagtccctaatccttttggtttggttcgtttgtgtacgtagatcgatctctctccggacttgtttcctctgtagatgctagggttggttggtgttcttcctcaacc

SEQ ID NO: 296 - protein, 291 aa, Oryza sativa
MAAAIDLSGEELMRALEPFIRDASGSPPVCSQFSPTSPFSFPHAFAYGGGLAQQPELSPAQMHYIQARLHLQRQAAQAGPLGPRAQPMKASSSSASAAGAAATPPRPQKLYRGVRQRHWGKWVAEIRLPRNRTRLWLGTFDTAEEAALAYDQAAYRLRGDAARLNFPDNAASRGPLHASVDAKLQTLCQNIAAAKNAKKSSVSASAAATSSAPTSNCSSPSSDDASSCLESADSSPSLSPSSAATTAETPATVPEMQQLDFSEAPWDEAAAFALTKYPSYEIDWDSLLAAN

SEQ ID NO: 297 - DNA, 1657 bp, Oryza sativa
aacccaaacgacggagacccactactccgagccatcaagaacacacacacatccagaaagcctaatccaatccaaaagccctaatcacccagactccatctctgtgaggtttgagagaggtaggtgagccgtagatctgagcgagttcttgggtcttccagcaggtagatcacttcatctgaggatcaatctttttttttttcctttgtttttgagcttctgttggtgtacaggacagagagttccagagccttttagtttctggtgttctgatctgttcttggtgtaagattattggtctgatttggtagccaagagggttaattttttccacacctccttgtgctagttagcttagcttataccccccttgtaaagtgattagtagatctagaacttctcttttcgtctgccagttcttggattttggaaagaacaggtggtttgttattcagatttttaggttagaaaaaatccacaaaaaaaaagatattcgatggcagctgctatagaaggaaatctgatgcgggcgctgggagaggctccgtcgccgcagatgcagaagatcgcgccgccgccgtttcatcccggcttgccgccggcgccggcgaacttctcctcggccggagtccacgggttccactacatgggcccggcccagctcagcccggcccagatccagcgcgtccaggcccaactccacatgcagcggcaggcccagtcggggctcggcccgcgggcccagcccatgaagcccgcttcggcggctgctccggcggcggcggcggcgcgggcgcagaagctgtaccgcggcgtgcggcagcggcactggggcaagtgggtggcggagatccggctgccgcgcaaccgcaccaggctctggctcggcaccttcgacaccgccgaggaggcggcgctcacctacgaccaggccgcgtaccgcctccgcggcgacgcggcgcggctcaacttcccggacaacgccgcgtcgcggggcccgctcgacgccgccgtggacgccaagctccaggccatctgcgacaccatcgccgcgtccaagaacgcctcatccaggtccaggggcggcgccggcagggccatgcccatcaacgcgcccctggtcgccgcggcgtcgtcgtcctccggctccgaccactccggcggcggcgacgacggcggctcggagacgtcgtcgtcgtctgcggcggcgtcgccgctggcggagatggagcagctggacttcagcgaggtgccgtgggacgaggcggaggggttcgcgctcaccaagtacccgtcgtacgagatcgactgggactcgctgctcaacaacaataactagctcttctcttccatagcccgccattgccggccggcgcagatgaggttttaggcattctgcgcggcggcgaggcgatggattatatgttcgttcttgtgtagatccttttctttttgtgttggttttttaggttccggaggctgctcgccggcgtcgtttttgtgtccggcgtctccgatgtctagtaagcagtgactcgttagtgtagtagttgtacaactctacaaatgtacaaatacttgtgcatgtaggttgttgtaatcaattgttggtaactacctgtaatagaactactgtgaattaactgtattaatgtgc

SEQ ID NO: 298 - protein, 280 aa, Oryza sativa
MAAAIEGNLMRALGEAPSPQMQKIAPPPFHPGLPPAPANFSSAGVHGFHYMGPAQLSPAQIQRVQAQLHMQRQAQSGLGPRAQPMKPASAAAPAAAAARAQKLYRGVRQRHWGKWVAEIRLPRNRTRLWLGTFDTAEEAALTYDQAAYRLRGDAARLNFPDNAASRGPLDAAVDAKLQAICDTIAASKNASSRSRGGAGRAMPINAPLVAAASSSSGSDHSGGGDDGGSETSSSSAAASPLAEMEQLDFSEVPWDEAEGFALTKYPSYEIDWDSLLNNNN

SEQ ID NO: 299 - DNA, 835 bp, Lycopersicon esculentum
gtttgttccacttccacagagatgaattcccaaatcttttcaactgggttttctgggtatggaatggagcaacagggttcaattgggctgaatcagttaaccccaattcagatccagcaaattcaagctcaaatcaactttcaaaaccaacaacaacagcagcagcagcagatgatgttacagactgcccatcatgcttccaccatgaatttcttggctccaaagccggttccaatgaagcaatctgggtcgccaccaaaacccacgaagctctacagaggtgttagacaacgccactggggtaagtgggtcgctgagatccgtttgcctaagaaccgaacccgcctttggcttggtacatttgacaccgctgaagaagctgctctggcttacgacaaggcggcgtatatgcttcgtggcgactttgctcgactgaacttccctcaactccgccacaacggcaacctaatcggcggcgactttggtgaatacaatccattgcattcctcagttgatgctaagctaaaggacatatgccaaagcttggcacaggggaagagcattgactctaagaagaagaaaaccaaagggttgtcggcggagaaagcggcggtggtgaagatggaggaagaggagagcaaaacagcagaagttggatccgaaagtgacgggtcccattccggttccggtggatcatcgccggtgaccgaactgatattcccggagttcactgaggaagagccaacttgggacatgtcagaaaattttttgttgcagaagtatccatctcatgaaattgattgggcctctctataaaattagaaaataattaaga

SEQ ID NO: 300 - protein, 264 aa, Lycopersicon esculentum
MNSQIFSTGFSGYGMEQQGSIGLNQLTPIQIQQIQAQINFQNQQQQQQQQMMLQTAHHASTMNFLAPKPVPMKQSGSPPKPTKLYRGVRQRHWGKWVAEIRLPKNRTRLWLGTFDTAEEAALAYDKAAYMLRGDFARLNFPQLRHNGNLIGGDFGEYNPLHSSVDAKLKDICQSLAQGKSIDSKKKKTKGLSAEKAAVVKMEEEESKTAEVGSESDGSHSGSGGSSPVTELIFPEFTEEEPTWDMSENFLLQKYPSHEIDWASL

SEQ ID NO: 301 - DNA, 1042 bp, Zea mays
cacgagcaatccccttcaacaaacgcaccgcactccacggcagccagaaaacacatcccacggggcccagacccggcgacccacctgagcccggcgcagatgcagttcatccaggcccagctccacctgcagcggaacccggggctgggcccgcgggcgcagcccatgaagcccgccgtcccagtgccgccggcgccggcgccgcagcggcctgtgaagctgtaccgcggcgtgcggcagcgtcactggggcaagtgggtggccgagatccggctcccccggaaccgcacccgcctgtggctcgggaccttcgacaccgccgagcaggcagcgctggcctacgaccaggcggcgtaccgcctccgcggggacgcggcgcggctcaacttccccgacaacgcggagtccagggcgccgctcgaccccgccgtggacgccaagctgcaggccatctgcgccaccatcgccgccgcgtcgtcgtcatccaagaattccaaggccaagagcaaggcgatgccaatcaacgcgtccgttctggaagcggcagcggcgtctccgagcaacagctcctccgacgaaggttccggctccgggttcgggtcggacgacgagatgtcctcgtcttccccgacgccggtggtggcgccgccggtggcggacatgggacagttggatttcagcgaggttccgtgggacgaggacgagagcttcgtgctccgcaagtacccgtcctacgagatcgactgggacgcgctgctctccaactagtcgcccttcgccgacagatgtgctgttgtagttcagtagtggcagtatctctggccgccgcagatgaggttttaggcaatctgcaggccgccggcccatgtgtattaagtaggttttgctcagttgttggccccggacttcgccggcgtttttgtgaccggcgtccccgagtgcactgcattggtgtactggtctgtctgtaaaaaaaaatggatctgtgtacttctatagtgtgtattcaaccattgttcttaaaaaaaaaaaaaaaaaaaaa

SEQ ID NO: 302 - protein, 222 aa, Zea mays
MQFIQAQLHLQRNPGLGPRAQPMKPAVPVPPAPAPQRPVKLYRGVRQRHWGKWVAEIRLPRNRTRLWLGTFDTAEQAALAYDQAAYRLRGDAARLNFPDNAESRAPLDPAVDAKLQAICATIAAASSSSKNSKAKSKAMPINASVLEAAAASPSNSSSDEGSGSGFGSDDEMSSSSPTPVVAPPVADMGQLDFSEVPWDEDESFVLRKYPSYEIDWDALLSN

SEQ ID NO: 303 - DNA, 926 bp, Oryza sativa
ggaaagaacaggtggtttgttattcagatttttaggttagaaaaaatccacaaaaaaaaagatattcgatggcagctgctatagaaggaaatctgatgcgggcgctgggagaggctccgtcgccgcagatgcagaagatcgcgccgccgccgtttcatcccggcttgccgccggcgccggcgaacttctcctcggccggagtccacgggttccactacatgggcccggcccagctcagcccggcccagatccagcgcgtccaggcccaactccacatgcagcggcaggcccagtcggggctcggcccgcgggcccagcccatgaagcccgcttcggcggctgctccggcggcggcggcggcgcgggcgcagaagctgtaccgcggcgtgcggcagcggcactggggcaagtgggtggcggagatccggctgccgcgcaaccaccccaggctctggctcggcaccttcgacaccgccgaggaggcggcgctcacctacggccaggccgcgtaccgcctccgcggcgacgcggcgcggctcaacttcccggacaacgccgcgtcgcggggcccgctcgacgccgccgtggacgccaagctccaggccatctgcgacaccatcgccgcgtccaagaacgcctcatccaggtccaggggcggcgccggcagggccatgcccatcaatgcgcccctggtcgccgcggcgtcgtcgtcctccggctccgaccactccggcggcggcgacgacggcggctcggagacgtcgtcgtcgtctgcggcggcgtcgccgctggcggagatggagcagctggacttcagcgaggtgccgtgggacgaggcggaggggttcgcgctcaccaagtacccgtcgtacgagatcgactgggactcgctgctcaacaacaataactagctcttctctccatag

SEQ ID NO: 304 - protein, 280 aa, Oryza sativa
MAAAIEGNLMRALGEAPSPQMQKIAPPPFHPGLPPAPANFSSAGVHGFHYMGPAQLSPAQIQRVQAQLHMQRQAQSGLGPRAQPMKPASAAAPAAAAARAQKLYRGVRQRHWGKWVAEIRLPRNHPRLWLGTFDTAEEAALTYGQAAYRLRGDAARLNFPDNAASRGPLDAAVDAKLQAICDTIAASKNASSRSRGGAGRAMPINAPLVAAASSSSGSDHSGGGDDGGSETSSSSAAASPLAEMEQLDFSEVPWDEAEGFALTKYPSYEIDWDSLLNNNN

SEQ ID NO: 305 - DNA, 1434 bp, Atriplex hortensis
aatttacttacccccaagcccagccccaacaaatgagctactcatacccacctccacttcctagtaatacccttaacaactttctatctcccaagcctgtgaccatgaaaacaactggtgggccgcccaagcccactaagctttatcgtggggttaggcaacgtcactggggtaaatgggttgctgagatccgtttacccaagaacaggacccggctttggttgggtacctttgatacagctgaggaagctgctttggcttacgacaaggcggcttacaagctgagaggtgactttgcgaggttgaattttcctaatctccgccatgaagggtcccacatcggtggcgaattcggcgaatacaaaccccttcattcctccgtaaacgcaaaactcgaagccatttgcgagagtctagccaaacaggggaatgaaaaacaggggaaatcaggaaagtccaagaagaaagatgttgctaataataacaataatacttcatcttcgtcatcttcaagctgttgtacaacagctactgctgcggccgatgcaccgcagcagcagcagcggatgccggaaaacggcggcgatgtaaaaaccgagagcacctccgatagtgaggtggggtccggtggatcgtcgccgttgtcggatttgacattcggagataatgaagaaatgggatcggagaatttcttgttggagtcatgcccatctcatgagattgattgggatgctatattatcatctgaatcttaataatttcatttgtggtcttaagtatgggttaataaggagtattaattaaattaaattagggagttataaaatgtgtcatcataatataagtcatgtaatgttgtgtaaattttttctttttttttttttaattttaattaaaattagtaggttggtagtgggtagtttcagggaggagtgatctctgcaatgaagtttttggaaattgtagggactccatatttggtcttctttggtgaggcaagtgtttttttgatcttgcctttgatcaattgaagagtagtttttttttcttattgtttattttatgtttatagtagaaaaaattttaggattgtaatttgatgatcatttttagtgaagtattattattaatatttttattagtataaaaaaaaattggactgttatcaaggtaagtgcttattttgacttccatatttgtatgttgctctctttctttgattctttcatatttctagtgagatctgaactataattaatatggattaaaccttaaattactagtggtttgtgtaacaggatatgcttgatgttcctgttttatacataatcggagcttttgtccctgcaacaatgattgcagtgctctattattttgatcacagtgtggcatctcaacttgctcagcagcgacagcaacggaattcggccctcg

SEQ ID NO: 306 - protein, 240 aa, Atriplex hortensis
MSYSYPPPLPSNTLNNFLSPKPVTMKTTGGPPKPTKLYRGVRQRHWGKWVAEIRLPKNRTRLWLGTFDTAEEAALAYDKAAYKLRGDFARLNFPNLRHEGSHIGGEFGEYKPLHSSVNAKLEAICESLAKQGNEKQGKSGKSKKKDVANNNNNTSSSSSSSCCTTATAAADAPQQQQRMPENGGDVKTESTSDSEVGSGGSSPLSDLTFGDNEEMGSENFLLESCPSHEIDWDAILSSES

SEQ ID NO: 307 - DNA, 1507 bp, Arabidopsis thaliana
aacaagagccaagctaatgagataagtgtatcggtgaggctgagagttattcacttacaaaaaaaaaaaaaaacttgagtgtaaccaaaaaaaaaagttgatatactttctggttttctccttaacttttattctttacaaatccatcccccttagatctgtttatttcccgctactttgattcatttctgttagtaatctgtctttcgtatagaagaaaactgatttcttggtttgtattttcttaaagagatcaatctttttttatttttgatcttcttgtgtttttttttctttgtagaattaatcgtttgtgagggtatttttttaattccctcctctcagaaatctacacagaggttttttattttataaacctctttttcgattttcttgaaaacaaaaaatcctgttctttactttttttacaagaacaagggaaaaaaatttctttttattagaaatgacaacttctatggatttttacagtaacaaaacgtttcaacaatctgatccattcggtggtgaattaatggaagcgcttttaccttttatcaaaagcccttccaacgattcatccgcgtttgcgttctctctacccgctccaatttcatacgggtcggatctccactcattttctcaccatcttagtcctaaaccggtctcaatgaaacaaaccggtacttccgcggctaaaccgacgaagctatacagaggagtgagacaacgtcactggggaaaatgggtggctgagattcgtttaccgaggaatcgaactcgactttggctcggaacattcgacacggcggaggaagctgctttagcttatgacaaggcggcgtataagctccgaggagattttgcgcggcttaatttccctgatctccgtcataacgacgagtatcaacctcttcaatcatcagtcgacgctaagcttgaagctatttgtcaaaacttagctgagacgacgcagaaacaggtgagatcaacgaagaagtcttcttctcggaaacgttcatcaaccgtcgcagtgaaactaccggaggaggactactctagcgccggatcttcgccgctgttaacggagagttatggatctggtggatcttcttcgccgttgtcggagctgacgtttggtgatacggaggaggagattcagccgccgtggaacgagaacgcgttggagaagtatccgtcgtacgagatcgattgggattcgattcttcagtgttcgagtcttgtaaattagatgttgccataggggtattttagggactttagagctctctgcgatggagtttttggtcattgcagagattttattattattaagggggtttgttatgttaatatcaaataagtttatctactttgatgttaattagtgttaatctctgcgtcggtccaagctgtttttttttggcatgcttcgaccgtgtgagatttcttatgtaatttttgtagttccttgattttcttagttcaagttaaattggcacaaaagaac

SEQ ID NO: 308 - protein, 261 aa, Arabidopsis thaliana
MTTSMDFYSNKTFQQSDPFGGELMEALLPFIKSPSNDSSAFAFSLPAPISYGSDLHSFSHHLSPKPVSMKQTGTSAAKPTKLYRGVRQRHWGKWVAEIRLPRNRTRLWLGTFDTAEEAALAYDKAAYKLRGDFARLNFPDLRHNDEYQPLQSSVDAKLEAICQNLAETTQKQVRSTKKSSSRKRSSTVAVKLPEEDYSSAGSSPLLTESYGSGGSSSPLSELTFGDTEEEIQPPWNENALEKYPSYEIDWDSILQCSSLVN

SEQ ID NO: 309 - DNA, 1296 bp, Arabidopsis thaliana
ataacgagagattttttatatataaaaaataaaggaagcacgagttcaccttaaaaatttgagtttctcttttcttgaccctgaagtttcgttttgatcaatttcacccatttctttgttcgtcgtcttttctttcaaaagggtttcatctttgtattataaaaatccaaactttatatcttcacaagcagcaaagatctctatttcaatcctctcatggaaactgcttctctttctttccctgtcccaaacacgagcttcggtgtaaacaaatctatgcctctcggtctaaaccagctcacaccataccaaattcatcagattcagaaccagcttaaccatagacgtagcacaatctcaaacctctctccaaaccgtatcagaatgaagaacttaacaccttctacctccaaaaccaagaatctctacagaggcgtaaggcaaaggcactgggggaaatgggtcgctgagatccgtttgcccaagaaccggacccgtctctggctcgggacattcgaaaccgccgaaaaagccgccttagcttacgaccaagctgcttttcagctccgtggagatatcgcgaagcttaacttcccaaacctcatacacgaagacatgaatcctctcccttcctctgttgataccaagcttcaagctatctgcaaaagtttgagaaaaacagaggaaatttgctctgtttctgatcaaacaaaggagtactctgtttactctgtttcagataaaacagagcttttcctgccaaaagcagagcttttcttgcctaaaagagagcatttggagacaaatgagctctctaatgagtcaccgagaagcgatgagacctcgttgttggatgagtcgcaggcggaatattcatcgtcggataaaacattcctggatttctcggatactgagtttgaagagattggaagtttcgggcttcggaagtttccttcggtggagattgattgggatgcaattagtaaactggccaattcttaaagtcttctattttatattaatcttctgtgcaactgaaattttcaacaagttgcagatgagtttattaggtttgaatctgtcctagttttctttgttggtcgtatagagttttactatgtagctaatctccatgtttggtttggcttggtaagtttttaaggtcctcgtcatcaacaaaccggagaaagtttatgtattcaaaagctatgtattatatcctcacatctacttatgagagtgagatcaaagtttgtaaaatgaagtcttgatttcttcttttagttctctcttttt

SEQ ID NO: 310 - protein, 261 aa, Arabidopsis thaliana
METASLSFPVPNTSFGVNKSMPLGLNQLTPYQIHQIQNQLNHRRSTISNLSPNRIRMKNLTPSTSKTKNLYRGVRQRHWGKWVAEIRLPKNRTRLWLGTFETAEKAALAYDQAAFQLRGDIAKLNFPNLIHEDMNPLPSSVDTKLQAICKSLRKTEEICSVSDQTKEYSVYSVSDKTELFLPKAELFLPKREHLETNELSNESPRSDETSLLDESQAEYSSSDKTFLDFSDTEFEEIGSFGLRKFPSVEIDWDAISKLANS

SEQ ID NO: 311 - DNA, 1296 bp, Glycine max
ataacgagagattttttatatataaaaaataaaggaagcacgagttcaccttaaaaatttgagtttctcttttcttgaccctgaagtttcgttttgatcaatttcacccatttctttgttcgtcgtcttttctttcaaaagggtttcatctttgtattataaaaatccaaactttatatcttcacaagcagcaaagatctctatttcaatcctctcatggaaactgcttctctttctttccctgtcccaaacacgagcttcggtgtaaacaaatctatgcctctcggtctaaaccagctcacaccataccaaattcatcagattcagaaccagcttaaccatagacgtagcacaatctcaaacctctctccaaaccgtatcagaatgaagaacttaacaccttctacctccaaaaccaagaatctctacagaggcgtaaggcaaaggcactgggggaaatgggtcgctgagatccgtttgcccaagaaccggacccgtctctggctcgggacattcgaaaccgccgaaaaagccgccttagcttacgaccaagctgcttttcagctccgtggagatatcgcgaagcttaacttgccaaacctcatacacgaagacatgaatcctctcccttcctctgttgataccaagcttcaagctatctgcaaaagtttgagaaaaacagaggaaatttgctctgtttctgatcaaacaaaggagtactctgtttactctgtttcagataaaacagagcttttcctgccaaaagcagagcttttcttgcctaaaagagagcatttggagacaaatgagctctctaatgagtcaccgagaagcgatgagacctcgttgttggatgagtcgcaggcggaatattcatcgtcggataaaacattcctggatttctcggatactgagtttgaagagattggaagtttcgggcttcggaagtttccttcggtggagattgattgggatgcaattagtaaactggccaattcttaaagtcttctattttatattaatcttctgtgcaactgaaattttcaacaagttgcagatgagtttattaggtttgaatctgtcctagttttcttgttggtcgtatagagttttactatgtagctaatctccatgtttggtttggcttggtaagtttttaaggtcctcgtcatcaacaaaccggagaaagtttatgtattcaaaagctatgtattatatcctcacatctacttatgagagtgagatcaaagtttgtaaaatgaagtcttgatttcttcttttagttctctctttttc

SEQ ID NO: 312 - protein, 272 aa, Glycine max
MAALMDFYSSSTEFQLHSDPFRGELMEVLEPFMKSPFSTPSPSNSCFLSTSYSPSPNNYSPSLYSNGLSSIPNTTQNLIGFGQGQPTSLVGLNHLTPSQISQIQAQIQIQNHSNTLSFLGPKPIPMKHVGMPPKPTKLYRGVRQRHWGKWVAEIRLPKNRTRLWLGTFDTAEEAALAYDKAAYKLRGDFARLNFPNLRHQGSSVGGDFGEYKPLHSAVDAKLQAICEGLAELQKQGKTEKPPRKTRSKLASPPENDNNNDNNSCKVEAAPPL

SEQ ID NO: 313 - DNA, 977 bp, Arabidopsis thaliana
gtacatttttttttgtatttcaggaaactccgatggcggatctcttcggtggtggccacggcggcgagcttatggaagcacttcaacctttttacaaaagtgcttccacgtctgcttcaaatcctgcgtttgcgtcctcaaacgatgcgtttgcgtctgccccaaacgacctattttcttcttcttcttactataatcctcatgcatctttattcccttcacattccacaacctcttacccggatatttattctggatccatgacctatccatcttcattcgggtcggatcttcaacaacccgaaaactaccaatctcagttccattaccaaaacactatcacttacactcaccaagacaacaacacttgcatgcttaacttcattgagccgagccaaccgggttttatgacccaaccgggtccgagttcgggttcggtttcaaaaccggctaagctctatagaggagtgaggcaaagacattggggaaaatgggtcgcggagatccgtttacccaggaaccgaacccgactttggctcggaacattcgacacggctgaagaagccgcgttggcttatgatcgcgccgcgtttaagcttcgtggtgactcggctcggcttaacttcccagctctccgataccaaaccggctcgtctccgtctgataccggcgaatatggtcctattcaagctgccgtagacgctaaactagaagccatattagctgagccgaagaatcagccgggcaaaacggagaggacgtcgaggaaacgagctaaagccgcggcttcttcagctgagcagccgtcagcgccacaacaacattccgggtcgggtgaaagtgatgggtcgggttcaccgacttcggatgttatggtgcaggagatgtgccaagagccagagatgccatggaatgaaaatttcatgctcggcaagtgtccttcttatgagatagattgggcttcaattttatcgtga

SEQ ID NO: 314 - protein, 314 aa, Arabidopsis thaliana
MADLFGGGHGGELMEALQPFYKSASTSASNPAFASSNDAFASAPNDLFSSSSYYNPHASLFPSHSTTSYPDIYSGSMTYPSSFGSDLQQPENYQSQFHYQNTITYTHQDNNTCMLNFIEPSQPGFMTQPGPSSGSVSKPAKLYRGVRQRHWGKWVAEIRLPRNRTRLWLGTFDTAEEAALAYDRAAFKLRGDSARLNFPALRYQTGSSPSDTGEYGPIQAAVDAKLEAILAEPKNQPGKTERTSRKRAKAAASSAEQPSAPQQHSGSGESDGSGSPTSDVMVQEMCQEPEMPWNENFMLGKCPSYEIDWASILS

SEQ ID NO: 315 - DNA, 1291 bp, Arabidopsis thaliana
aacaaatctctctgtttctcccgctcttgctctgttttctcaaagacaaaagaggacatcgtcgttgactcctcttctctatggctactgctaagaacaagggaaaatcaatcagggtccttggtaccagtgaagcagagaaaaaggatgagatggagttggaggaggagttccagtttagtagcggcaagtataaagattcgggtcctggctcggacatgtggttaggagatgcttcctctacgtctccaagaagtcttaggaagactagaacctttgaccgacataatccctatctcgtatcttcttatgctactcctcagccgccaacaacaactacatgctctgtctcttttcccttttacctccctccagcgattcaaaatcaacaacgatttttacacccgaatgacccttcaggacaaagacagcaacaaatgatctcgtttgatcctcaacaacaggtgcaaccatatgttgcacaacagcagcaacaacaacaacatctattgcagtactggagagacattctgaagctgagtccgagcggaagaatgatgatgatgaacatgttaagacaagaaagcgatctgccactgacgaggccaccggttcaacccttcagcgccaccaagctatatagaggtgtcaggcaacgccactggggaaaatgggttgccgagatccgtaagccacgaaacaggacacgtctctggctagggacattcgatacagcagaagaagccgccatggcctacgaccgcgaggccttcaagttgaggggagagaccgctaggctcaatttccctgaactttttctcaataaacaagagccaactcccgtgcatcagaaacaatgtgagacggggactactagtgaagactcaagcagaagaggagaggatgattcgagcacggcattggcagtaggaggggtgagtgaggagacgggttgggctgaggcatggttcaatgcaattccagaggaatggggacctggaagccctctatgggatgattaccactttcccatttctaaccataaggacgatcttgacgccacacaaaactcttcttctgatacaatttaggacctttgttagaatatagatatgcttagttgtatgactgatctagcttgtgttttttttttgggtggagacagtttttgtcatcttccacattttagattctattttcgaccatcatttttttcttgatcggtgactatgaatctaatggggtcaatcattttcacatataaaacttaagtatttggtgtttgtacttc

SEQ ID NO: 316 - protein, 336 aa, Arabidopsis thaliana
MATAKNKGKSIRVLGTSEAEKKDEMELEEEFQFSSGKYKDSGPGSDMWLGDASSTSPRSLRKTRTFDRHNPYLVSSYATPQPPTTTTCSVSFPFYLPPAIQNQQRFLHPNDPSGQRQQQMISFDPQQQVQPYVAQQQQQQQHLLQYWRDILKLSPSGRMMMMNMLRQESDLPLTRPPVQPFSATKLYRGVRQRHWGKWVAEIRKPRNRTRLWLGTFDTAEEAAMAYDREAFKLRGETARLNFPELFLNKQEPTPVHQKQCETGTTSEDSSRRGEDDSSTALAVGGVSEETGWAEAWFNAIPEEWGPGSPLWDDYHFPISNHKDDLDATQNSSSDTI

SEQ ID NO: 317 - DNA, 1405 bp, Arabidopsis thaliana
atgatcacaccaatacacacacaacactccttaattctcgtatatataaacatttattctccacctattttgtcaaaattaagaacaggcttcattctctggacaaacactcaaaaaacaaacaaaaaaaggaacatggaagatcagtttcctaaaatagaaactagcttcatgcacgacaagctcttgtcttctggaatctacgggttcttgagttcttcgacgccgccacaacttctcggtgttccaatatttttggaaggtatgaaatctcctcttcttcctgcttcttcgactccgagctactttgtgtcgcctcatgatcatgagctcacatcttctattcatccatctccggtagcttctgttccttggaactttctagaatcttttcctcagtctcaacatcctgatcatcatccttctaaacctccaaaccttactttgttccttaaagaaccaaagctactagaactttctcaatccgaaagcaacatgagcccttaccataaatacatcccaaactccttttatcaatcagaccaaaacagaaacgaatgggtagagatcaataaaactctaaccaactatccctcgaaaggttttggaaactattggctaagtaccaccaagactcaacccatgaagtcaaaaacaagaaaggttgttcagacgacgaccccaacaaaactgtatagaggagtgagacaaagacactggggcaaatgggtcgcagagattaggcttccaaggaacagaacccgtgtttggctcggcacttttgaaaccgctgagcaagcagcaatggcttacgatacagcagcttatatccttcgtggcgaattcgcacacctcaactttcctgatcttaaacaccagctcaagtccggttctttgcgatgcatgatcgcctcacttttggagtccaagattcaacagatctcatcttcccaagtaagtaactctccttctcctcctcctccaaaagtgggaacaccggagcaaaagaatcatcacatgaagatggagtcaggagaagacgtgatgatgaagaaacagaaaagccataaggaagtgatggaaggagatggtgtacaattgagtaggatgccttctttggatatggatctcatttgggatgctctctcatttcctcattcttcttgacttcaaattaatatttgtcaaacttattttacttacttctacccttttttatatcaaaagtttccaccaaagaaagaaattcatattatgatgccaagattggtttgcatttggggttgaacacattgtaattcttcttacgaccacataatcaagtggttctcctttttttgtctgctaattaattgttcttttctttgcggttactagtaaccataaaatagaaaagtgtttgttt

SEQ ID NO: 318 - protein, 388 aa, Arabidopsis thaliana
MITPIHTQHSLILVYINIYSPPILSKLRTGFILWTNTQKTNKKRNMEDQFPKIETSFMHDKLLSSGIYGFLSSSTPPQLLGVPIFLEGMKSPLLPASSTPSYFVSPHDHELTSSIHPSPVASVPWNFLESFPQSQHPDHHPSKPPNLTLFLKEPKLLELSQSESNMSPYHKYIPNSFYQSDQNRNEWVEINKTLTNYPSKGFGNYWLSTTKTQPMKSKTRKVVQTTTPTKLYRGVRQRHWGKWVAEIRLPRNRTRVWLGTFETAEQAAMAYDTAAYILRGEFAHLNFPDLKHQLKSGSLRCMIASLLESKIQQISSSQVSNSPSPPPPKVGTPEQKNHHMKMESGEDVMMKKQKSHKEVMEGDGVQLSRMPSLDMDLIWDALSFPHSS

SEQ ID NO: 319 - DNA, 1422 bp, Oryza sativa
atggacgcggtggacagaggcggaggcggaggcggtggaggagcgcgcgggcacgggcggagatggaaggggaagggagtgagcgcggcgatctcctcctccgcggccgagacgcagcagccggtgccagttttagaagacgcgccggcggccgcagcattgctccgtccccagaagaagatccgcagccccgatcgtcgcctccagcgctccatctcctcgctgtcgtcggcccctgcttcccccgactcgtcctctgtctccaaccccatgtctcccccggcgatgtccttgccgaatcagccgccatcgtcgcgacatatatttccgttcgcgtacgatccgtctccgggcgcggcggcaccaaggctcctcccgctgctgcagtactccagcttgtacccgcagcctctgctgccgcagcagcaatcacccttgcagaatcagcaaatgatatcgttcggcagtagccagcagcagcagcagcagcagccgcagtttggggcggcgtctcctctgttcccgccgcagttcttgccgccggaggagcagcagcgcctgctgctgcgctactggagcgaggcgctgaacctgagccccccaggcgtgcgcggcggcgccctgccgccgtcgctgtaccagcacctgctgcgcgcgcctgggccgcccaaactgtaccgcggcgtgcggcagcgccactgggggaagtgggtggcggagatccgcctgccgcggaaccgcaccaggctgtggctcggcacgttcgacaccgccgaggacgcagccatggcgtacgaccgcgaggccttcaagctccgcggcgagaacgcgcggctcaacttccccgacctcttccttggcaaaggccgcaccggcgggagcggacgcaccagcgccagcgccgcggcctcctgctcctcctcctcctcttcggctccgcctacaccggacgagagccacacgcagcaagctcagccgcagccgcagcagcctacagaagagtcatccaacactgaaccgaagcctctgctcttcgtagcagagcaggacggcattccagaacccgagctgaatcctcagctccagacagctgaacaacatggcagcgacggcaacacggccatgttccagccgtcggtgacgtccggcggcatttggggtccggccgacgaggcgtggttcagcgcttgggggccaggaagctccgtctgggactacgacatggacagcgcccacggcctcctcctccagtctcgcttggccggtgagcagaccggcatggactacgcctacaccgcgccggaagtcctcgtggcaccggtgccggcggcagggacagccatggccactgccgcttcctcctctcttcctcctcgtcctccccctccttgccacagtccaaccttcgcatggaaggactaa

SEQ ID NO: 320 - protein, 473 aa, Oryza sativa
MDAVDRGGGGGGGGARGHGRRWKGKGVSAAISSSAAETQQPVPVLEDAPAAAALLRPQKKIRSPDRRLQRSISSLSSAPASPDSSSVSNPMSPPAMSLPNQPPSSRHIFPFAYDPSPGAAAPRLLPLLQYSSLYPQPLLPQQQSPLQNQQMISFGSSQQQQQQQPQFGAASPLFPPQFLPPEEQQRLLLRYWSEALNLSPPGVRGGALPPSLYQHLLRAPGPPKLYRGVRQRHWGKWVAEIRLPRNRTRLWLGTFDTAEDAAMAYDREAFKLRGENARLNFPDLFLGKGRTGGSGRTSASAAASCSSSSSSAPPTPDESHTQQAQPQPQQPTEESSNTEPKPLLFVAEQDGIPEPELNPQLQTAEQHGSDGNTAMFQPSVTSGGIWGPADEAWFSAWGPGSSVWDYDMDSAHGLLLQSRLAGEQTGMDYAYTAPEVLVAPVPAAGTAMATAASSSLPPRPPPPCHSPTFAWKD

SEQ ID NO: 321 - DNA, 1604 bp, Oryza sativa
acgtttggctgcaccctgtctcgcggctgatacgtttgcacaggcgttcagatacagccgatacaccggcggcgctagctgcgtttcttctccgcatggacgctccgtcgtcgccctcgccaccgtcggcgcgacacatcttccccttcgcgtacgaggcctccacgacgacggtgggtgggagcccaaggctccacccgctgtcgtggcagcaatccagcatgtcccagcccgcgtcgccacagcaacagcagcagcagccgttgcagcaccagcagatgatatcgttcggcgcgtcgcctccgtgctcgacgacgcagttcgtcgtcccggagaacgcgcagcagcagcagatgctgctgcggtactggagcgaggcgctgaacctgagcccgcgcggtggccccggtggcgtgccaccgtggctgtaccagcagctgctccgggtcccgccaccgccgcagaagctttaccgcggcgtgcggcagaggcactgggggaagtgggtcgcggagatccgcctgccacggaaccgcacgcggctgtggcttggcaccttcgacaccgccgaggacgccgccatggcgtacgaccgcgaggccttcaagctccgcggcgagaacgcgcggctcaactttccggaccggttccttgggaagggccgcgccggcgggaaaggccgcaccagcgtaagctcctcggccgctgccgccgcgtcgtgctcgtcgtcgtcgctatcgccaccggagacacctgacgacgcaaacacgcagcaacaagctcctcagcagcgagaacagcgggacacggcaggagtgtccatggagaagaaacaaccacagcctccagctccaacctctcgtcaagaagggtgctctggcggcgacgcagctgcgccgtacccggccgaaatgcttcacgcgccggcggcgtgcggcggcatgtgggttgctcccgacgagtcatggttcagcacgtggggccctggcagctccttctgggacgactacgacatggacagcgctcgcggcctcttcctccaccctcgcttcaccggtgacgaaactagcatggatcattccggcacgcaagcaaccgtgccggcagtggcagcaacagcggcagggatgagcatgccatgcgatgatgttccggtaacctcttcttcttcagatctccctccccaagggacacctcagactcctaccttcatgtggaaggaggactaagcatgcatgcacacagccacgcacctcgacgagacgactatctcttccatctcccatcgacttcgacgatctctttcattactcatcgacttcaaccacaaaggtatgattagggtagagatgcttgcagattgcagttttaaagacaattttgcagcatcacacagctctacgtacaacagccacacctatatcaattctcaagacttctaaaccacaagggaacccctgttctaggctgcgatttttaggtcagcttgttggggtgaccacagtacaattccctttatttcgtatcttcccaagattgtgtgtgtcagatattcgttgaactcgacttcaaaagatttgaagtattcatgttttcttttactc

SEQ ID NO: 322 - protein, 377 aa, Oryza sativa
MDAPSSPSPPSARHIFPFAYEASTTTVGGSPRLHPLSWQQSSMSQPASPQQQQQQPLQHQQMISFGASPPCSTTQFVVPENAQQQQMLLRYWSEALNLSPRGGPGGVPPWLYQQLLRVPPPPQKLYRGVRQRHWGKWVAEIRLPRNRTRLWLGTFDTAEDAAMAYDREAFKLRGENARLNFPDRFLGKGRAGGKGRTSVSSSAAAAASCSSSSLSPPETPDDANTQQQAPQQREQRDTAGVSMEKKQPQPPAPTSRQEGCSGGDAAAPYPAEMLHAPAACGGMWVAPDESWFSTWGPGSSFWDDYDMDSARGLFLHPRFTGDETSMDHSGTQATVPAVAATAAGMSMPCDDVPVTSSSSDLPPQGTPQTPTFMWKED

SEQ ID NO: 323 - DNA, 1401 bp, Oryza sativa
atggacgctccgagcggcgagagcggcggcggcggcggcggcggtggtggcaggaggtggaaggggaagggggtgacgcccatacagccgcggcggcagctggggacggttttggaggactcgtcggcggcattgctgcggccgctcaagaagattgggcggagccccgaccgcctcctccgctccgcatcgtcgctctccacgtcctcgtcggctccgccttcgcctcgctcttcttcggcttccgatgctccagtccgcgtcatctcgtcgtcgccgtcgtcgccctcgccaccgtcggcgcgacacatcttccccttcgcgtacgaggcctccacgacgacggtgggtgggagcccaaggctccacccgctgtcgtggcagcaatccagcatgtcccagcccgcgtcgccacagcaacagcagcagcagccgttgcagcaccagcagatgatatcgttcggcgcgtcgcctccgtgctcgacgacgcagttcgtcgtcccggagaacgcgcagcagcagcagatgctgctgcggtactggagcgaggcgctgaacctgagcccgcgcggtggccccggtggcgtgccaccgtggctgtaccagcagctgctccgggtcccgccaccgccgcagaagctttaccgcggcgtgcggcagaggcactgggggaagtgggtcgcggagatccgcctgccacggaaccgcacgcggctgtggcttggcaccttcgacaccgccgaggacgccgccatggcgtacgaccgcgaggccttcaagctccgcggcgagaacgcgcggctcaactttccggaccggttccttgggaagggccgcgccggcgggaaaggccgcaccagcgtaagctcctcggccgctgccgccgcgtcgtgctcgtcgtcgtcgctatcgccaccggagacacctgacgacgcaaacacgcagcaacaagctcctcagcagcgagaacagcgggacacggcaggagtgtccatggagaagaaacaaccacagcctccagctccaacctctcgtcaagaagggtgctctggcggcgacgcagctgcgccgtacccggccgaaatgcttcacgcgccggcggcgtgcggcggcatgtgggttgctcccgacgagtcatggttcagcacgtggggccctggcagctccttctgggacgactacgacatggacagcgctcgcggcctcttcctccaccctcgcttcaccggtgacgaaactagcatggatcattccggcacgcaagcaaccgtgccggcagtggcagcaacagcggcagggatgagcatgccatgcgatgatgttccggtaacctcttcttcttcagatctccctccccaagggacacctcagactcctaccttcatgtggaaggaggactaa

SEQ ID NO: 324 - protein, 466 aa, Oryza sativa
MDAPSGESGGGGGGGGGRRWKGKGVTPIQPRRQLGTVLEDSSAALLRPLKKIGRSPDRLLRSASSLSTSSSAPPSPRSSSASDAPVRVISSSPSSPSPPSARHIFPFAYEASTTTVGGSPRLHPLSWQQSSMSQPASPQQQQQQPLQHQQMISFGASPPCSTTQFVVPENAQQQQMLLRYWSEALNLSPRGGPGGVPPWLYQQLLRVPPPPQKLYRGVRQRHWGKWVAEIRLPRNRTRLWLGTFDTAEDAAMAYDREAFKLRGENARLNFPDRFLGKGRAGGKGRTSVSSSAAAAASCSSSSLSPPETPDDANTQQQAPQQREQRDTAGVSMEKKQPQPPAPTSRQEGCSGGDAAAPYPAEMLHAPAACGGMWVAPDESWFSTWGPGSSFWDDYDMDSARGLFLHPRFTGDETSMDHSGTQATVPAVAATAAGMSMPCDDVPVTSSSSDLPPQGTPQTPTFMWKED

SEQ ID NO: 325 - DNA, 1528 bp, Arabidopsis thaliana
attaaatagatctttaaacaaaaaaaccaaattctacttttctttcaaaaacaatctctcattatctcaatcttactcttgttcaatctcttttgaacttgaaaaaccatcattctatcaaatcaaacacaattgttagggtttctttttatcttatactccacgaaacgtctggttgagaaaaaatggaagaaagcaatgatatttttcagaacaatttcagtcctaaaatctcagaaatcagagcatctctgtctcagatcatattagcaggaggaccaaacacactcgactcaatcttctcacttctcactccctcctccgtagaatccgccacaacatcattcaacactcacaatcctccgccaccgccgcagctcgggtcctccgtctatctccgccaacgagatatcatcgagaagttccaccttcagaacagagcaatctccactcctcatcctcctctgttttcctcaacgtacgatcatcatcaaacttccgagctaatgctccaagcggcggccgggtctccagccgccgctttcgccgctgcgttagcggctgggagggtgacgaaaaagaagaaactttacagaggagtgaggcagagacattggggaaaatgggttgcggagataagattgccgcaaaacagaatgagggtttggttaggtacttacgacacggcggaagccgccgcttacgcttacgatcgcgccgcctataagctccgtggagaatacgctcgtctcaattttcctaatctcaaagacccgagtgagctactcggactcggagattcctctaagctaatagctctcaagaacgccgtcgacgggaagatccaatccatttgccagagagtcagaaaagagagagcaaaaaagagcgtaaaagtgagcaaaaactcgtcggccacggcggattcttcgtgtttgtcatcgccggagattctgtcgtcgtctccggtgacgacaactactactgcggttacttcagaggatagttattgggtttcacctatgggtttgtgtaacagtgaaaatagttctccggtatcagtttcggtccctagtgaagtaccggcgacggcggaggaagaggcaatgatgggagtggacactgatgggtttttattagcgaggatgccatcgttcgatccagagctgatttgggaagttcttgccaattaatactacacaaagaatgtgaattttgatcaaaattgcaacaagaagaagaaaaaaaaaagtttggaattaggacaaaaatgatgagaaaaattagggttttaggtgttaatttagggtttaaagtaaaaccggatcttttgttaaaatcattcgaaagttgttaaataatataattagggtttctcaaatacaatgtaaagcctcgtggtttttgaaagaggttgtgaaagctcctttttttgaatttctgttttagatcatcgaaggactttctttctgattgtacttagaagaacaattatatgttacagtgttaatttaataaaattgagatt

SEQ ID NO: 326 - protein, 335 aa, Arabidopsis thaliana
MEESNDIFQNNFSPKISEIRASLSQIILAGGPNTLDSIFSLLTPSSVESATTSFNTHNPPPPPQLGSSVYLRQRDIIEKFHLQNRAISTPHPPLFSSTYDHHQTSELMLQAAAGSPAAAFAAALAAGRVTKKKKLYRGVRQRHWGKWVAEIRLPQNRMRVWLGTYDTAEAAAYAYDRAAYKLRGEYARLNFPNLKDPSELLGLGDSSKLIALKNAVDGKIQSICQRVRKERAKKSVKVSKNSSATADSSCLSSPEILSSSPVTTTTTAVTSEDSYWVSPMGLCNSENSSPVSVSVPSEVPATAEEEAMMGVDTDGFLLARMPSFDPELIWEVLAN

SEQ ID NO: 327 - DNA, 843 bp, Oryza sativa
atggcagctgctatagaaggaaatctgatgcgggcgctgggagaggctccgtcgccgcagatgcagaagatcgcgccgccgccgtttcatcccggcttgccgccggcgccggcgaacttctcctcggccggagtccacgggttccactacatgggcccggcccagctcagcccggcccagatccagcgcgtccaggcccaactccacatgcagcggcaggcccagtcggggctcggcccgcgggcccagcccatgaagcccgcttcggcggctgctccggcggcggcggcggcgcgggcgcagaagctgtaccgcggcgtgcggcagcggcactggggcaagtgggtggcggagatccggctgccgcgcaaccgcaccaggctctggctcggcaccttcgacaccgccgaggaggcggcgctcacctacgaccaggccgcgtaccgcctccgcggcgacgcggcgcggctcaacttcccggacaacgccgcgtcgcggggcccgctcgacgccgccgtggacgccaagctccaggccatctgcgacaccatcgccgcgtccaagaacgcctcatccaggtccaggggcggcgccggcagggccatgcccatcaacgcgcccctggtcgccgcggcgtcgtcgtcctccggctccgaccactccggcggcggcgacgacggcggctcggagacgtcgtcgtcgtctgcggcggcgtcgccgctggcggagatggagcagctggacttcagcgaggtgccgtgggacgaggcggaggggttcgcgctcaccaagtacccgtcgtacgagatcgactgggactcgctgctcaacaacaataactag

SEQ ID NO: 328 - protein, 280 aa, Oryza sativa; identical to SEQ ID NO: 298

SEQ ID NO: 329 - DNA, 822 bp, Oryza sativa
atggacgccagcctccgcacactgcctccggcgatcttccccggcgaggtccgctccgccgtctcctccctcctcctctctcccggcggcagcgccctcgacaccgtgttctcccacctcccgccgcccgtcaccatcccgccgctcggctccagcgtctactaccgccagagcgagctcctgcgccacttcgccgcgtcgcaggcggcgcaggcgcagagcgccaccgccgccgccagctcttcgtcggccgccgcggcgggtctcgacgatggcgcgccgcggaagctgtaccgcggcgtgcggcagcggcagtgggggaagtgggtggccgagatcaggctgccgcagaaccgggtgcgcgtgtggctcggcacctacgactcgccggagaccgccgcgcacgcctacgaccgcgccgcgttcaagctccgcggcgagtacgcgcgcctcaacttccccggcgtcatggacggccgcgactgccccgacaacctgcgccaactccgcgacgccgtcgacgccaagatccaggccatccgcgtccgcatggcgcgcaagcgcgcgcgcgcgcgccgccagcgcgaggagagcaagaagagccaacgcgccgaggacgcgaaggcggcgacgccgtctcgccccgtggcctccgagcgcgccgcgtccgagacgacgacgacgacaaccacgacgtcgtcgtcgtacgggtcaccggacggcgtgctctccatgagcgcggcgtccgtcgacggcgactgcccgctcgagcggatgccgtcgttcgatcccgagttgatctgggagatgcttaacttctag

SEQ ID NO: 330 - protein, 273 aa, Oryza sativa
MDASLRTLPPAIFPGEVRSAVSSLLLSPGGSALDTVFSHLPPPVTIPPLGSSVYYRQSELLRHFAASQAAQAQSATAAASSSSAAAAGLDDGAPRKLYRGVRQRQWGKWVAEIRLPQNRVRVWLGTYDSPETAAHAYDRAAFKLRGEYARLNFPGVMDGRDCPDNLRQLRDAVDAKIQAIRVRMARKRARARRQREESKKSQRAEDAKAATPSRPVASERAASETTTTTTTTSSSYGSPDGVLSMSAASVDGDCPLERMPSFDPELIWEMLNF

SEQ ID NO: 331 - protein, 34 aa, Artificial sequence
  C-terminal reqion of SEQ ID NO: 2
PFLMQWLNLLPLPVLDSSSWCPEHFHNSESDALP

SEQ ID NO: 332 - protein, 56 aa, Artificial sequence
  AP2 DNA-binding domain
YRGVRQRHWGKWVAEIRLPRNRTRLWLGTFDTAEEAALAYDSAAFRLRGESARLNF

SEQ ID NO: 333 - protein, 17 aa, Artificial sequence
  AP2-70-like polypeptide motif XVIII
  UNSURE (4)..(4): Xaa can be any naturally occurring amino acid
  UNSURE (6)..(6): Xaa can be any naturally occurring amino acid
  UNSURE (8)..(8): Xaa can be any naturally occurring amino acid
  UNSURE (10)..(10): Xaa can be any naturally occurring amino acid
  VARIANT (15)..(15): Xaa is Tyr or Phe
  VARIANT (16)..(16): Xaa is Glu or Asp
  VARIANT (17)..(17): Xaa is Ser or Thr
RLPXNXRXRXWLGTXXX

SEQ ID NO: 334 - protein, 3 aa, Artificial sequence
  AP2-70-like polypeptide motif XIX
  VARIANT (3)..(3): Xaa is Glu or Asp
RGX

SEQ ID NO: 335 - protein, 24 aa, Artificial sequence
  AP2-70 polypeptide motif XX
WDESESFLLHKYPSLEIDWDAILS

SEQ ID NO: 336 - protein, 17 aa, Artificial sequence
  AP2-70 polypeptide motif XXI
GPPLHAAVDAKLHAICH

SEQ ID NO: 337 - protein, 23 aa, Artificial sequence
  AP2-70 polypeptide motif XXII
GANYLTPAQVLHVQAQLQRLRRP

SEQ ID NO: 338 - protein, 28 aa, Artificial sequence
  AP2-70 polypeptide motif XXIII
VDSKELMGALAPSMVSFSYPCSEQSASS

SEQ ID NO: 339 - DNA, 2194 bp, Oryza sativa
aatccgaaaagtttctgcaccgttttcaccccctaactaacaatatagggaacgtgtgctaaatataaaatgagaccttatatatgtagcgctgataactagaactatgcaagaaaaactcatccacctactttagtggcaatcgggctaaataaaaaagagtcgctacactagtttcgttttccttagtaattaagtgggaaaatgaaatcattattgcttagaatatacgttcacatctctgtcatgaagttaaattattcgaggtagccataattgtcatcaaactcttcttgaataaaaaaatctttctagctgaactcaatgggtaaagagagagattttttttaaaaaaatagaatgaagatattctgaacgtattggcaaagatttaaacatataattatataattttatagtttgtgcattcgtcatatcgcacatcattaaggacatgtcttactccatcccaatttttatttagtaattaaagacaattgacttatttttattatttatcttttttcgattagatgcaaggtacttacgcacacactttgtgctcatgtgcatgtgtgagtgcacctcctcaatacacgttcaactagcaacacatctctaatatcactcgcctatttaatacatttaggtagcaatatctgaattcaagcactccaccatcaccagaccacttttaataatatctaaaatacaaaaaataattttacagaatagcatgaaaagtatgaaacgaactatttaggtttttcacatacaaaaaaaaaaagaattttgctcgtgcgcgagcgccaatctcccatattgggcacacaggcaacaacagagtggctgcccacagaacaacccacaaaaaacgatgatctaacggaggacagcaagtccgcaacaaccttttaacagcaggctttgcggccaggagagaggaggagaggcaaagaaaaccaagcatcctccttctcccatctataaattcctccccccttttcccctctctatataggaggcatccaagccaagaagagggagagcaccaaggacacgcgactagcagaagccgagcgaccgccttctcgatccatatcttccggtcgagttcttggtcgatctcttccctcctccacctcctcctcacagggtatgtgcctcccttcggttgttcttggatttattgttctaggttgtgtagtacgggcgttgatgttaggaaaggggatctgtatctgtgatgattcctgttcttggatttgggatagaggggttcttgatgttgcatgttatcggttcggtttgattagtagtatggttttcaatcgtctggagagctctatggaaatgaaatggtttagggatcggaatcttgcgattttgtgagtaccttttgtttgaggtaaaatcagagcaccggtgattttgcttggtgtaataaagtacggttgtttggtcctcgattctggtagtgatgcttctcgatttgacgaagctatcctttgtttattccctattgaacaaaaataatccaactttgaagacggtcccgttgatgagattgaatgattgattcttaagcctgtccaaaatttcgcagctggcttgtttagatacagtagtccccatcacgaaattcatggaaacagttataatcctcaggaacaggggattccctgttcttccgatttgctttagtcccagaattttttttcccaaatatcttaaaaagtcactttctggttcagttcaatgaattgattgctacaaataatgcttttatagcgttatcctagctgtagttcagttaataggtaatacccctatagtttagtcaggagaagaacttatccgatttctgatctccatttttaattatatgaaatgaactgtagcataagcagtattcatttggattattttttttattagctctcaccccttcattattctgagctgaaagtctggcatgaactgtcctcaattttgttttcaaattcacatcgattatctatgcattatcctcttgtatctacctgtagaagtttctttttggttattccttgactgcttgattacagaaagaaatttatgaagctgtaatcgggatagttatactgcttgttcttatgattcatttcctttgtgcagttcttggtgtagcttgccactttcaccagcaaagttc

SEQ ID NO: 340 - DNA, 1264 bp, Oryza sativa; identical to SEQ ID NO: 110

SEQ ID NO: 341 - DNA, 1542 bp, Hordeum vulgare
ccgcttcattaaaaactgcccatttttccagttccgacgaggcgcctccccccctccccggcgacgactaggacgaggcaccgccggcaacaaccatgtgcggcggcgcgatcctcaaggacctcaaggtccccgcggtgacgcggaaggtgacggaggcggcgctgtggcccgagaagaagaagcccaggcaggccgacggcggggcccggcgcctcgggctggtcgacggcgaggaggacttcgaggccgacttcgaggagttcgaggccgactccggggactccgacctggagctcgggcgcggccgggcggctgagaaggacgacgacgaggtcgtcgagatcaagccctacgccgccgtcaagaggcccctctcccaagatgacttcagcatcattactactgctggttgtgatggtcctgcacaaaggtcagcaaaaaggaagagaaagaaccaattcaggggtatccgtcagcgcccctggggtaagtgggctgctgaaatcagagatcctagcaaaggtgtccgtgtttggcttggtactttcaacagtgctgaagaagctgcaagagcctacgatgttgaagcacgcaggatccgtggcaagaaggccaaggtaaactttccagaggaaccaacagttcctcagaagcgccgtgttcgccctgctcctcttaaagcacccaagctaagcgcatcacaggaacctaccgtcataccagcagtcaacaaccttgccaacccaaatgctttcgtctacccatctgctgactttgcatcaaaccagccacctgttcagcctgataacgtgccatttgttcctgcaatgaagtttgctgcccctgttgaagctcctgttatgaatatgtactctgaccagggaagcaactcttttggctgttctgacttgggctgggactatgagaccaagactccagatatatcatccgttgctcccatttccaccattgctgaaggagcagaatctgcgcttatccagagcaacacctacaactcagtggtgcctcctgttatggagaacaatgctgtcgattttgaaccttggacgaggtttcttatggatgatggcgtggatgagccgattgacagccttctgaactttggtgtgcctcaggatgtcattagcaacatggacctttggagcttcgatgacatgcccatctgtggagaattatgctgagggattcaaacccctgtatataaagacaaagggaataagactatgggagattgggaagcaccctgttgtcaacttcggctagcatatgcttatgtccaagcttagatgcaaaaaagttgcatcctgagtctcttttgtaatcaacccttttcctagctgactgtcgatgaaccgttgtcatttatgagtctgatgaaccgttgtctttatcttttgtcaacttatatgtcgtcgctaccatttctgaatgtgaatggcatggatctatgtccagtttgctttaaaaaaaaaaaaaaaaaaaaaaaaaaaaaaaaaaaaaaaaaaaaaaaaaaaaaaa

SEQ ID NO: 342 - protein, 369 aa, Hordeum vulgare
MCGGAILKDLKVPAVTRKVTEAALWPEKKKPRQADGGARRLGLVDGEEDFEADFEEFEADSGDSDLELGRGRAAEKDDDEVVEIKPYAAVKRPLSQDDFSIITTAGCDGPAQRSAKRKRKNQFRGIRQRPWGKWAAEIRDPSKGVRVWLGTFNSAEEAARAYDVEARRIRGKKAKVNFPEEPTVPQKRRVRPAPLKAPKLSASQEPTVIPAVNNLANPNAFVYPSADFASNQPPVQPDNVPFVPAMKFAAPVEAPVMNMYSDQGSNSFGCSDLGWDYETKTPDISSVAPISTIAEGAESALIQSNTYNSVVPPVMENNAVDFEPWTRFLMDDGVDEPIDSLLNFGVPQDVISNMDLWSFDDMPICGELC

SEQ ID NO: 343 - DNA, 1489 bp, Zea mays
caccatttcgctcccgcaagcaccgatttgtttactgctctctccgacgcgcggcggcggagctccctacgacgactgaaccatgtgcggcggcgcgatccttgccaacctccgcgagccggcgccgcgccggctcacagagcgggacatctggcagcagaagaagaagcccaagaggggcggcgccggcgggaggcgctcgttcgcggcggaagacgatgaggacttcgaggccgacttcgaggacttcgaagccgactccagtgattcagatttggagctcagggaagggactgacgacgacgtcatcgagatcaagcccttcaccgccaagaggactttctccagagatggcttaagcaccatgactactgctggttagcaaggtcagccaaaaggaagaggaagaatcaatacaggggtatccgccagcgcccttggggtaagtgggctgctgagatcagagatccccagaagggcgttcgtgtttggcttggtactttcaatagtccggaggaagctgcaagagcttatgatgctgaagcgcgcaggattcgtggcaagaaggccaaggttaactttcctgatgcaccagcagttggtcagaagtgccgttctagttcagcttctgctaaagcactcaagtcatgtgttgaacagaagccaattgtcaaaacagatatgaacatccttgccaacacaaatgcacccttctaccaatctgttaactacgcatccaatttatttgttcagcatggcaatatgccatttgttccagcaatgaactctactgtttcttttgatgatcctatcatgaatctgcactctgaccagggaagtaactcccttggctgctcagacttgggctgggagaatgataccaagacaccagacatcacatccattgctcccattcccactattgctgaaggcgatgagtctgtatttgtcaactccaattcaaacagctcgatggtgcctcctgtcctggagaacaatgctgttgatctcactgatgggctgacagatttagaatcctatatgaggtttcttctggatggcggtgcaagtgattcaattgatagccttctgaaccttgatggatcgcaggatgttggtagcaacatggacctctggaccttcgatgacatgcccatcgctggcgatttcttctgaggaatttgaagcttggccataggactatgtacatagggactaggggaataaagactgggagattgggaagcacctgcttggcaccttgggggtagcatatgctcgtgtctagctcagatgcagaagtcgcattctgaaactctttggttatcgacctgttccctattttaactatctctgtatgagagccatttatgagactgaaccattttgttttgctttcttttcgttgttacaatatatggtttaacattatgatttatggatatgtgccaaatatggtgctcaacagtggtcaaacatgccttttaga

SEQ ID NO: 344 - protein, 164 aa, Zea mays
MNILANTNAPFYQSVNYASNLFVQHGNMPFVPAMNSTVSFDDPIMNLHSDQGSNSLGCSDLGWENDTKTPDITSIAPIPTIAEGDESVFVNSNSNSSMVPPVLENNAVDLTDGLTDLESYMRFLLDGGASDSIDSLLNLDGSQDVGSNMDLWTFDDMPIAGDFF

SEQ ID NO: 345 - DNA, 789 bp, Triticum aestivum
gacgaggcaccgccggcaatcatgtgcggcggcgcgatcctcaaggacctcaaggtccccgcgccgacgcggaaggtgacggcggcggtgctgtggcccgagaagaacaagcccaagcgggccgacggcggcgcccggcgcctcgcggggctcggccggcgcggggggctcgggctggacgacggcgacgcggacttcgaggccgacttcgaggagttcgaggccgactccggggactccgaccaggagctcgggcgcgccggggtggctgagaaggacggcgacgacgaggtcgtcgagaccaagcccttcgccgccgtcaagaggtccctctcccaagatgacttaagcaccatgaccactgctggttttgatggtcctgcacaaaggtcagcaaaaaggaagagaaagaacgaattcaggggtatccgccagcgcccctggggtaagtgggctgctgaaatcagagatcctagcaagggtgtccgtgtttggcttggtaccttcaacagtgctgaagaagctgcaagagcttatgatgttgaagcacgaaggatccgtggcaagaaggccaaggttaactttccagaggaaccaacagttcctcagaagcgccgtgcttgccctgctgctcctaaagttcccaagtcaagcgcagcacaggaacctaccgtcataccagcagtcaacaaccttgccaacccaaatgctttcgtctacccgcctgctgactttgcatcaaagcagccacttgttcagcctgacaacgtgccatatgttccctgcaat

SEQ ID NO: 346 - protein, 256 aa, Triticum aestivum
MCGGAILKDLKVPAPTRKVTAAVLWPEKNKPKRADGGARRLAGLGRRGGLGLDDGDADFEADFEEFEADSGDSDQELGRAGVAEKDGDDEVVETKPFAAVKRSLSQDDLSTMTTAGFDGPAQRSAKRKRKNEFRGIRQRPWGKWAAEIRDPSKGVRVWLGTFNSAEEAARAYDVEARRIRGKKAKVNFPEEPTVPQKRRACPAAPKVPKSSAAQEPTVIPAVNNLANPNAFVYPPADFASKQPLVQPDNVPYVPCN

SEQ ID NO: 347 - DNA, 1399 bp, Triticum aestivum
gggacacacacgcagatccgagctaaccaccatcgacgagcgccagcgccagcagccgagccggatcgaccttttcttttttcttttacacagcgggacagagaaaggagtcaggcagccaaagccacccaccgcttttaccaaccgatcgtccgatcggcgttgccgccaccgctagcattgtcggcttcagctccatccaaatccaccgccagcaagcaagccggcgccatgggtctgccgatgaggagggagagggacgcggaggcggagctcaacctgccgccggggttccggttccacccgacggacgaggagctggtggcgcactacctctgcgcgcgcgccgcggggcgccgcccgcccgtgcccatcatcgccgaggtcgacctgtaccgcttcgacccctgggacctgccggagcgcgccctcttcgggcgccgcgagtggtacttcttcacgccgcgggaccgcaagtaccccaacggctcccgccccaaccgcgccgccgggtcgggctactggaaggccacgggcgcggacaagcccgtggagcacgggggccggacggcggggatcaagaaggcgctcgtgttctaccacggcaagccgccgcgcggggtcaagacggagtggatcatgcacgagtaccgcctcgccgaagccggcggcgcccgcgccaagaagtccggcgccggcacgctcaggctggatgactgggtgctgtgccgcctgtacaacaagaagaacgagtgggagaagatgcagcagcagaaggagaaggagagaagaaggcgatggagtcggaggcgtcgctctcgcactcccactccgacacgcggacgccggaatcggagatcgacgacgacccgttcccggagctgggctctctgccggcgttcgacgacatgggcccagccccagcagcagcagcccctgccggcgtcgtcctgcccaaggaggaggtggaggacttcggcgacctcggcggcgacgactggctcgcgggcatcaacctcgacgacctgcagatgccgggggacgccgccgatttctacggctccatgctcgtctcgccgatggccgccaagatggagccggacggcggcttccccttcttctgagatccttcggcgactccggggacgaccggatgcagcgcaacgcaaactgtgtatagttcagattttcttcatggaaccaacaacaacaacaaaaaaagttctgctaatatcttgttctagtggtgtagtgcagaagtagcagcaggcatgattgaagttccattgtagtactgatgttcatcgccacttgatctgtgacaagtgacggcattctttcgtttcttggctgcaaattcttcgttgttcagaatataatttcagatgggtaatgccaa

SEQ ID NO: 348 - protein, 343 aa, Triticum aestivum
MGLPMRRERDAEAELNLPPGFRFHPTDEELVAHYLCARAAGRRPPVPIIAEVDLYRFDPWDLPERALFGRREWYFFTPRDRKYPNGSRPNRAAGSGYWKATGADKPVEHGGRTAGIKKALVFYHGKPPRGVKTEWIMHEYRLAEAGGARAKKSGAGTLRLDDWVLCRLYNKKNEWEKMQQQKEKERRRRWSRRRRSRTPTPTRGRRNRRSTTTRSRSWALCRRSTTWAQPQQQQPLPASSCPRRRWRTSATSAATTGSRASTSTTCRCRGTPPISTAPCSSRRWPPRWSRTAASPSSEILRRLRGRPDAAQRKLCIVQIFFMEPTTTTKKVLLISCSSGVVQK

SEQ ID NO: 349 - DNA, 1262 bp, Hordeum vulgare
tttcatatgcagtagccgtcttctcctcctcctcctcctcctgccttccagctagctcactatcgcatcatccacaccacacctactactcataccgattccgttcccacccgctcgccatcgccatgccaatgggcagcagcagcagcagcgccgccatgccggccctccctcccggcttccgggtccaccccaccgacgaggagctcatcgtccactacctcggcaggcaggccgcgtccatgcccagccccgtgcccatcatcgccgaggtcaacatctacaagtgcaacccatgggacctccccggcaaggccttgcttggggagaacgagtggtacttcttcagcccccgggatcgcaagtaccccaacggcgcgcgcccgaaccgcgccgccgggtccggctactggaaggccaccggcaccgacaagcccatcccgcccagggagagcggcggcaggaccgtcggcatcaagaaggcgctcgtcttctactccggcagggcgcccaggggcgtcaagaccgactggatcatgcacgagtaccgcatcgcccaagccgaccgcacacccggcaagaagggatccctcaagctggacgaatgggtgctgtgccggctgtataacaagaagaacaactgggacaaggtcaaggtggagcaggacatggctgtggtgcagggacagaatggggaggtcatggacgcgctggccaccgacgccatgtccgacagcttccagacgcacgactcctcggagatcgacaacgcctccggcctgcagcagcagcaccacggcttcatggacatggcgcagcggcaggccagggaaggcatggtgacggtcaaggaggacagcgactggttcaccggcctgagtatggacgacctgcagacttgttacatgaacatggggcagatggtgaatccagcggcgatgcctgtgcacgacggcagcggctatctgcagtcgatgaactcgcctcagatgatgagacccatgtggcaaacaatcttgccaccattctgagatggaagaagaaagatatggtgtaaattatgtttgaaatagaagtgattagacaaatacttactttgaactagaaagagatagaaatttcccaggcatgattctgaagatgtggtggtaggcttgtagcagtatttattctttggtttcgatctataaatttggtattctaaacaaacatgtaattttattcccatatcatctcaagtctaagaaaaaaaaaaaaaaaaa

SEQ ID NO: 350 - protein, 301 aa, Hordeum vulgare
MPMGSSSSSAAMPALPPGFRVHPTDEELIVHYLGRQAASMPSPVPIIAEVNIYKCNPWDLPGKALLGENEWYFFSPRDRKYPNGARPNRAAGSGYWKATGTDKPIPPRESGGRTVGIKKALVFYSGRAPRGVKTDWIMHEYRIAQADRTPGKKGSLKLDEWVLCRLYNKKNNWDKVKVEQDMAVVQGQNGEVMDALATDAMSDSFQTHDSSEIDNASGLQQQHHGFMDMAQRQAREGMVTVKEDSDWFTGLSMDDLQTCYMNMGQMVNPAAMPVHDGSGYLQSMNSPQMMRPMWQTILPPF

SEQ ID NO: 351 - DNA, 1564 bp, Triticum aestivum
  misc_feature (1552)..(1552): n is a, c, g, or t
gcagctagaactgcggcgagctgatccagctgagagaactacagcgaggtttgttggatcgccgacccgaccggagatgagcggcggacaggagctgaatctgccgccgggcttccggttccacccgacggacgaggagctggtgacgcactacctctgccgccgctgcgccggcgcgcccatcgccgtccccatcatcaccgagatcgacctctacaagttcgacccctggcagctcccaaagatggcgctgtacggcgagaaggagtggtacttcttctccccgcgggaccgcaagtaccccaacgggtccaggcccaaccgggccgccgggtccggctactggaaggccaccggggccgacaagcccgtgggcacccccaagccgctggccatcaagaaggcgctcgtcttctacgccggcaaggcccccaagggcgagaagaccaactggatcatgcacgagtaccgcctcgccgacgtcgaccgatcccgccccgcaagaagaacagcctcaggttggatgattgggtgctgtgccgcatctacaacaagaagggcggcatggagaagccggcggccgtggaccggaagccggcggccatgggcggctacgggggtggccctggggccatggcgagctccccgccggagcagaagcccgtcatggggatgaacgccaacggcggcggcggcggcgcgcagccgttccgggacttcgcggcgtactacgaccggccgtccgactcgatgccgcggctgcacgcggactcgagctgctcggagcaggtgctgtcgccggagttcccggcggggaggtgcagagccagcccaagatcagcgagtgggagcgctcgttcgcctccggcggcgaccccgtgaacccggcggccggctccatgctcgagcccaacggcggcttcggcggcgacccgctcctccaggacatcctcatgtactggggcaagccgttctaggcagcgaagaaaccgatcggtcggtcgaagcgagtacctcctatccttggcgtttggggcgatgaaacgggcgagccgccattgttgacctgatgaaggggagataaatttaagaagatattagacgggagataagacaaaatcaggtgcttgatgacgacgacgacgacggcgaagatcggaaggtggcggcgatgataccgtgggtccccggcctctcaccagcatgacatgtgaccgacgacgcccaagatgcttcaaagcgttcgccgcattgcatcatcgggcgggcggtcgtgcgctagcaagcatgcatgtgcgtgtatatggatgggtgtacatacatggagatcatgattggttcggtgcaggggttgctgtttcttgattggttagttgtaatatttttttttttttgcgggtgagttgtaagggtttattgataagttgataccataccataccagtgctagccgccgtgcgtggtgctggctagctgtagtccgagtggtagtagtgtaactgtaagccattcatcaaatgaaactgaatatattatctgccctcaaaaaaanaaaaaaaaaaaa

SEQ ID NO: 352 - protein, 199 aa, Triticum aestivum
MSGGQELNLPPGFRFHPTDEELVTHYLCRRCAGAPIAVPIITEIDLYKFDPWQLPKMALYGEKEWYFFSPRDRKYPNGSRPNRAAGSGYWKATGADKPVGTPKPLAIKKALVFYAGKAPKGEKTNWIMHEYRLADVDRSRPARRTASGWMIGCCAASTTRRAAWRSRRPWTGSRRPWAATGVALGPWRAPRRSRSPSWG

SEQ ID NO: 353 - DNA, 1373 bp, Zea mays
cttgacgtctaccagctgcataataacttggttcagaagaagaagatggacgctttcacacatgttcctcccggctttcgtttccaccctaccgacgaggaactcgttgactactaccttaggaaaaaggtagcactgaagaagatagatttggatgtgataaaagatgtggatttgtacaagattgagccttgggatctgcaagaaaagtgcaggattggaagcgaagagcagaacgagtggtacttcttcagccacaaggacaagaagtacccaaccggcactcgcaccaacagagcgacgacggccggtttttggaaggccacggggagagacaagccgatctacgtgaagaactgcctcgtagggatgaggaagacactggttttctacaaaggccgggcgcccaatggacagaagtcagactggatcatgcacgagtatcgcctggagaccaacaacaatggaattccacatgaggaaggatgggttgtatgcagggtgttcaggaagcgactcgcgactgtccaaagaatggtcggggactcgccttactggttcaatgaccacgcggggttcatggcgccggagctcggctcaccgaggcaggcggcgcaccatcagcagaacgtcatgatgtaccacaggcaacagagcagctacagctacccttgcaaggtggagctggagtaccaccacctccttcctcaggagcacttcctgcagcagctccctcagctggagagccccaagctccctgaccttattggccaagtagacactactctccagccagcatgcggccttacacaggagcatggtgcccctcgctacaccatgcaggagcttcaggccgagcctctctatctggcgactggcggggacacagattggcgagctctcgacaagttcatggcgtcccagcttagccacggagacatcacccctaataaggagtcagctaactactccaatccggcactgcaggtgattcagcagtctgaagagaaagaagaggccttggactacgtgtcaacgtcagcctcctgtggaggggacaatgatttgtggaaataacagcgtcaatggtaatacatattcacatacgcactaaatcactggactagtgcattattccctcattacacagttaataacattgaggcgtgctggatgtaatgtaacgtagtatataaagtagccaactgattcatgtgtcatggtatagtagaatggtatgtgcataacaaagtgtaaccgagtaggtcacacgtccatgcataagttggcataatgtctggtgttaataataaggttagctaacagctgaagctaaggagcttcagcacctgatttgacaaaaaaaaaaaaaa

SEQ ID NO: 354 - protein, 343 aa, Zea mays
MDAFTHVPPGFRFHPTDEELVDYYLRKKVALKKIDLDVIKDVDLYKIEPWDLQEKCRIGSEEQNEWYFFSHKDKKYPTGTRTNRATTAGFWKATGRDKPIYVKNCLVGMRKTLVFYKGRAPNGQKSDWIMHEYRLETNNNGIPHEEGWVVCRVFRKRLATVQRMVGDSPYWFNDHAGFMAPELGSPRQAAHHQQNVMMYHRQQSSYSYPCKVELEYHHLLPQEHFLQQLPQLESPKLPDLIGQVDTTLQPACGLTQEHGAPRYTMQELQAEPLYLATGGDTDWRALDKFMASQLSHGDITPNKESANYSNPALQVIQQSEEKEEALDYVSTSASCGGDNDLWK

SEQ ID NO: 355 - DNA, 1361 bp, Helianthus annuus
cttgcttttgtgttgatatgtctaaagaagaagtgaatttgtctgtgaatgtaaatggtcagtctaaagtgcctccagggtttcggttccaccctaccgaagaagagcttcttcattactacttaaggaagaaagtcgcgtatgaaaagatcgatcttgatgttattcgtgatattgatcttaacaagctcgaaccatgggatatcaaagaaaagtgcagaattggatcaaccccgcaaaacgattggtatttttttagccacaaagacaagaaatacccgactggaacgcgtacaaatcgtgcaactgctgcaggtttttggaaagccaccggtcgagataaggtcatttatagtagcatgagaagaatcggtatgaggaagacactcgtgttctataaaggaagagcacctcatggacaaaagtcggattggattatgcacgaatatagactcgatgacaacacgattatctcccaggattatgcctcaggttctaatttatgtgattccactcaagaagacgggtgggtcgtatgtcgcgtttttaaaaagaaaaactaccataaagcggttgagagtccccaaaggtcatcatcagcaccttccattgattcaacagctcaaatgcaatctttaaagaaagatggaactcaacttcttgcatacatcaatggtactaaatcctgcaagcaagaaaccgaatcactcgccaatatagcaaccacccatgactatgaccctttgcaacaattcatcaacccgataagcgacagattcctacacctcccaaggctccacaacacttcaagtgacttgatcacgtcagccacctttgatcaagattcaatctttccggcccataacaccatgactcatttgctaacggaagttgaacattctaggaatcataaacatcttgaaaactggtcagatgtggatcgactcgtggcctcccaactcaatggccaaccgcgatcatccaggcagatgtacggttgctacgacgaacccaatgaagacatatgcttctcacttcaccatgatgatcagcaagaaccaccacaaccatcatccatggctaaacccaaccaagcagcctatacaagcgagatagatatatggagctttgcacaatcttcatcacaatcatcatcaccggatccattttaccatttgtcggtatagttcacataagtaatatactttttactttatggaaaatacagatggaataaactgttatatatacttggatgtatatatagtctctttaattagctgggtgggttatggatcttgatgtgaagtgaaaggtcatgacttatgaatgtattgtgtttgatgcaaaaaaaaaaaaaa

SEQ ID NO: 356 - protein, 389 aa, Helianthus annuus
MSKEEVNLSVNVNGQSKVPPGFRFHPTEEELLHYYLRKKVAYEKIDLDVIRDIDLNKLEPWDIKEKCRIGSTPQNDWYFFSHKDKKYPTGTRTNRATAAGFWKATGRDKVIYSSMRRIGMRKTLVFYKGRAPHGQKSDWIMHEYRLDDNTIISQDYASGSNLCDSTQEDGWVVCRVFKKKNYHKAVESPQRSSSAPSIDSTAQMQSLKKDGTQLLAYINGTKSCKQETESLANIATTHDYDPLQQFINPISDRFLHLPRLHNTSSDLITSATFDQDSIFPAHNTMTHLLTEVEHSRNHKHLENWSDVDRLVASQLNGQPRSSRQMYGCYDEPNEDICFSLHHDDQQEPPQPSSMAKPNQAAYTSEIDIWSFAQSSSQSSSPDPFYHLSV

SEQ ID NO: 357 - DNA, 1820 bp, Glycine max
tcacctcatcatctatcattatatctttctttcaattcctatcctcttccttgtagtgtacccattttgaatgtgttctctctctctctctctttctttaggtccctggtgaatatctagaaccactctctagctagtttctctcttcttgctagctagctatcgccgatcactctcttggtttaaaccacctgaatgccggaaaacatgagcatatcagtgaatggtcaatctcaagtccctcctggcttcaggtttcatccaactgaagaagagcttcttcagtactacttgaggaagaaggtctcttacgagaagattgacctcgacgtgattcgtgacgttgatctcaacaagctcgagccatgggacatacaagagaaatgcaaaataggaaccactccgcagaatgattggtacttcttcagccacaaagacaagaagtaccccacaggaacgcgcaccaatcgcgcaactgctgcagggttctggaaggccactggccgcgacaaagtcatctacagcaatggaaagaggattggaatgagaaagactctggttttctacaaaggaagagcgccacatggccagaaatccgattggatcatgcatgaatacagactagacgacaacaacaccaccgacaccaatattgtgtccaatgtgatgggggatgctgctcaggaagaagggtgggtggtgtgcaggatattcaagaagaagaaccatctgaaaaccctagacagccccttagcttcaggggaagatagaaggagccacttgttcgactcgtgcgacgagggagctttggagcaaatacttcagcaaatgggaaggggttgcaaggaggagagcagctatgaaggcaactacaacagctatggaaggtttacaaggccgtatgagacaacagcggcgaacaatggcggcggatacaatgataggttcatgaagctcccgagcctcgagagcccaaaatccgcaagcatggagaaccaccacaacaccaacaacaacaataacatgaatagtaataataataataatggtgataacaacgagaacaacaataataatgggtaccatcccataattccagtagagatgggcacggacaatgaagggacattcacaacgcaccaggtgagtggtggtgacccaaacaacaacaacaacaacagcaacattgttcatccattggaggtaggatcaggtggtggaggcctcaccaactgggctgcgctggaccgtttagttgcatctcaactcaatggccaaaccgatgcctctaggcaactaggatgtgctttcaacgaccccaccatgtattgcaccagcgtcgaccatcatgatcttcatcatcaaatccccaccctccgatcctcatcaacgtccgctaacacacgaccttcccctgcacccgcattcatcaaccccccaacacaggacttcaccagcgagattgacctttggaacttctcccgatccacgtcctcactgttggcatcctccgaaccactgtgccacgtgtccaacacgtcagtgtagcgagatcaataaaataataatataaaaaaaaatatctcaagtcccccttttcctccatgttcgattgttaaatatagaaataattagcccctacttcatcacatatcatgtttaatatttaatattagttcttcttctctcaagtctcagaggattattattacagactttaaatgtgataattctcctagtatacatttttactttaattagcttatttcgactcaaaaaaataatattccattgacaattgtctcttgtaaatcttaatt

SEQ ID NO: 358 - protein, 450 aa, Glycine max
MPENMSISVNGQSQVPPGFRFHPTEEELLQYYLRKKVSYEKIDLDVIRDVDLNKLEPWDIQEKCKIGTTPQNDWYFFSHKDKKYPTGTRTNRATAAGFWKATGRDKVIYSNGKRIGMRKTLVFYKGRAPHGQKSDWIMHEYRLDDNNTTDTNIVSNVMGDAAQEEGWVVCRIFKKKNHLKTLDSPLASGEDRRSHLFDSCDEGALEQILQQMGRGCKEESSYEGNYNSYGRFTRPYETTAANNGGGYNDRFMKLPSLESPKSASMENHHNTNNNNNMNSNNNNNGDNNENNNNNGYHPIIPVEMGTDNEGTFTTHQVSGGDPNNNNNNSNIVHPLEVGSGGGGLTNWAALDRLVASQLNGQTDASRQLGCAFNDPTMYCTSVDHHDLHHQIPTLRSSSTSANTRPSPAPAFINPPTQDFTSEIDLWNFSRSTSSLLASSEPLCHVSNTSV

SEQ ID NO: 359 - DNA, 3287 bp, Zea mays
tgacaacctgttactggatcattgtgatttttagcgcgaatagcacgagcgcaaaacgatatcaggtacttacaattgtttgcaaagtgacgaagaacatacaaggtgacatgaccacaattgtttgcagtgttgacacgagtgggctcacacaatagacaatacatatgtcgcacttcgatcccgtcctcttaacaaccagagcacaggaccgcatttaccatgggggtataccgtgttcgatatcaagaggccgcggtgcggtgctttgaccggctagttgtcggattgcatgctcctgagcatgttcaggatggagaggaacaggttcaggatgtcgaggtacagcccaaccgacgcccagatgtactcgtcgtaggtgtggcgcttgatcaggttctcggtgtcgtacaggatgaagcctgagaagaccagagcccctagaccaccgaacaagcccaccgacacgggtcacagtgggaagaaaacctgcagcgcagaattccacacagaaccaaataaaagtttattgtgcaagcagtggattgctcgtctggtaacaaagcatcattcgcggatatacagagcgcgtttctttcagagcttgtcgtaggcattacctgaagaaagctagttaggacgaggatagtaagcgcggaagacaggataggccccaggtacccgaattccttgcccttctttgacgcccagaaagcatacgcagtcagagaaaccaccacgccagccgtcagcactaaagcctccagaacgattttcccttgggtgttagcacaagccacgccgatgctgaagctcaagcacaacgtgaacagacccaggaaaacggaattgtgtgggtgcttgtgctgataatgatacaatgggatcatcaggatgaagggcaggacggcgagcacgagcgcgaggcccggggagtcggagagcgtggcgttgagggtggggtggagaacggtgagggcggagacggcggtggtgaggagcagctgcgcagcgaggatgccgtagaccttgcggacgaagccccatcggagggcgctctccccgcgcgagatccccgggtacagcgtctccccggtcccggcctccaggtccaccaccgacgcctccaccttctccttcatctccggcgcgcggcggtaccccgccggcgcgaggggctgcatctccgccaccgatgccatctctctctccgacgggggttgggtgcggtgcggtgcggggaaggggaaacccacgcgtccgcccacgcgtccgcccacgcgtccgcccacgcgtccgcccacgcgtccgcccacgcgtccgcccacgcgtccgcccacgcgtccgcggacgcgtgggatcgtcttcctcccctcacatcctctggcctctggtcctccaccgtcctgctagccagagctgctcttgtacgcgcagctggcctctgtgcatatcaccagcacaccgcgcaggggaaggaaattaacaagagaaaaggcaaggagagcaggcaggcaaggaagctgcagaagccaaggaaggagaaggaggatcatcaatgagcatctcggtgaacgggcagtcgtgcgtgccgccggggttccgcttccaccccacggaggaggagctgctcaactactacctccgcaagaaggtggcctcccaggagatcgacctcgacgtcatccgcgacgtcgacctcaacaagctcgagccatgggacatccaagagaaatgcaagatcgggtcgggtccccagaacgactggtacttcttcagccacaaggacaagaagtacccgacggggacgcgcaccaaccgcgccacggccgccgggttctggaaggccaccggccgcgacaaggccatctacaacgccgtcaagcgcatcggcatgcgcaagacgctcgtcttctacaagggccgcgcgccgcacggccagaagtccgactggatcatgcacgagtaccgcctcgacgaccccgctgctgctgctgctgctggatccggtgatgccgtggccaacgacgacgcagccgccacggctgctgctgctgccgccgcgtcgtcggacggcgggcaggaggacggctgggtggtgtgcagggtgttcaagaagaagcaccaccacaaggagtcaggtgggggcgggggcaacaagcacggcagcagtaacagcgagcatgggcacggcggcgccggcaaggcatcggctgcggctgcggctgcggcgcaccagcaccagcaccatggaggcctgcagtactcctccagcgacgaggcgctggaccagatcctgcagtacatgggcaggtcgtgcaagcaggagcacgagctggtgtcgccggcgccggcgccgccgggacgggcggcggcgtccaggtacctccggcccatcgagaccgttctgggcgggcacgcgttcatgaagcttcccgcgctcgagagcccgtcccagcgccaagcccaccaccaggagcgcgcgagtacgccgccgccggctgggacgacgacgacgcgctggaccgcctcgccgcctacgaccacctcaacggcctctccaacgacgacgcgtccaagaacatggccgcgttcttcgacgtcgagcctagcgccgccgccgccgccgccgtggacggcgacctgtggagcctcgcacggtccgtgtcggcgctgcacgcggacttgaccatgaacaacgtctagcttctgggtcccgaccaacaacaacagggccccgaatccccgatacacatccatatggcgtgtgcacgcatgcatgcatgcattgcatgccgcgcgcaccactaaccactcgaccagcatgcatgcatacgtgcgcaccccaccggcgcccgcggccgctagtgcgtcgtgctcccgtagtgcgtgcatgcatggccgccgcacgtacgtattgcacgctcgctcgcgcgtacgtacgtacgtgcgcgaataagctagctagccctaggatcggaaacatatgtatgcatccattgcatggccggatatacatcaggagctgctgccgctggtgtatgtccgccgccgtccaaactccaaagtgagctgagatcgatcgatcgagctcgctcgctccaggtgtgcagtacgtacgtacgtaagcgcctgtgtatgtgtaagcagacagcgtggtagtagctctagctagtagaacatacttacacacactatatactgcataccgtttgtacctatcatatatagattactactgtattattgcaaaccgctttggggggttttaaaaaaaaaaaaaaaaa

SEQ ID NO: 360 - protein, 376 aa, Zea mays
MSISVNGQSCVPPGFRFHPTEEELLNYYLRKKVASQEIDLDVIRDVDLNKLEPWDIQEKCKIGSGPQNDWYFFSHKDKKYPTGTRTNRATAAGFWKATGRDKAIYNAVKRIGMRKTLVFYKGRAPHGQKSDWIMHEYRLDDPAAAAAAGSGDAVANDDAAATAAAAAAASSDGGQEDGWVVCRVFKKKHHHKESGGGGGNKHGSSNSEHGHGGAGKASAAAAAAAHQHQHHGGLQYSSSDEALDQILQYMGRSCKQEHELVSPAPAPPGRAAASRYLRPIETVLGGHAFMKLPALESPSQRQAHHQERASTPPPAGTTTTRWTASPPTTTSTASPTTTRPRTWPRSSTSSLAPPPPPPWTATCGASHGPCRRCTRT

SEQ ID NO: 361 - DNA, 923 bp, Glycine max
ggcattggatcatttgtggcttgtaccgaactctgaatgccggagatgaagatgagcatatgtgtgaatggagaatcccaagtccctccaggcttccggtttcatccaaccgaagaggaactgttgcagtactatttgaggaagaaggtgtccaacgagaagatcgacctcgacgtgattcgcgatgttgatctcaacagactcgaaccatgggacatacaagagatgtgcaaaataggaagcagcccacaaaacgattggtacttgttcagccacaaggacaagaagtaccccacgggaagccgcaccaaccgcgccatcattgttgggttctggaaggccacggggcgcgacaaggtcatatatagcaacgggaagataattggaatgagaaaaacattggttttctacaaagggcgtgcccccaatggccaaaagtctgattggatcatgcatgaatacaggctagacgacattaataacaccaatgagatggaacacgggtgggtggtctgtagagttttcaagaagaagaatgtccctctcaaaaccctagatagcccaaaatccatgaccatgaatatgtttacagaaagcgactactgtggaggcttcactaactgggaatcccttgatcagcttgtggcatcacaactgaatggacaaactgagacatattgcagtgatttgcaattccccgcatttctatcatcctcatacattgctacaacaacacacattgctcccacaatacaggattaccccagctacgacattgacctgtggaaccactgtgcttcgcgcgtgtccaacactccaaatgtaacactctaatcaaatccttcttttaatttcttcccatgtcagattattactactattaaatcatccctaaaatattcattttcaaaaaaaaaaaaaaa

SEQ ID NO: 362 - protein, 265 aa, Glycine max
MPEMKMSICVNGESQVPPGFRFHPTEEELLQYYLRKKVSNEKIDLDVIRDVDLNRLEPWDIQEMCKIGSSPQNDWYLFSHKDKKYPTGSRTNRAIIVGFWKATGRDKVIYSNGKIIGMRKTLVFYKGRAPNGQKSDWIMHEYRLDDINNTNEMEHGWVVCRVFKKKNVPLKTLDSPKSMTMNMFTESDYCGGFTNWESLDQLVASQLNGQTETYCSDLQFPAFLSSSYIATTTHIAPTIQDYPSYDIDLWNHCASRVSNTPNVTL

SEQ ID NO: 363 - DNA, 1455 bp, Zea mays
ggtcgtctaaaaaagcagcagctgctcttctcttctgctagcagctttatttgcctgcctccctaccggcgagggaggtacgtgcgccgatcgagaagcagcagcagcaattaataactaaacatggatcaggcggcggaggagtcttgtgttcccccaggcttcaggttccaccctacggaggaagaactggtgggctactaccttgccaggaaggtggcctcccagaggatcgacctcgacatcatccaggaggtggatctctacaggatagagccatgggatctgcaagagcggtgcaagccgcagcacgccggcggtgggcacgacgagcagacacaggagtggtacttcttcagctacaaggaccgcaagtaccccagcgggacgaggacgaaccgcgccacggcggccggcttctggaaggccaccggcagggacaaaccggtgctgtcgtcgtccaccaggaccaccaggtgtagcagggtcatcggcatgaggaagacgctggtgttctacaagggcagggcacccaacggcaggaagagcgactggatcatgcacgagtaccgactccaatccaacgagcacgcaccggcgcaggaggaaggctgggtggtgtgccgcgctttccagaagcctatccccaaccagcggcccttcttccccaccagctacgccggctactacgaccacaacctctcaacgacggcacggctgcacgtagacggcgaccgccatttcctggcgggctcatcagcagcagcagcagcactgctacagcagccaccagggcttgcaggcagcagcttcccgcagctgtactccgacgacgacttggagtccaagaagcagctgttgagtatcccgccgctggagagccccactgccatggcctgctgttccgacgccggcggctacgcgcagagaagcagctacgatgaacatgagatgatgatgatgatgatccagcagggaggaggaggaggagagcaagctgcagccgccatcgactggaactttctggacagcctgctgtccgcgacgtcgcaactccatgggccctcgggatccttgttgcagtgacctccggccatcgtcgatcgatccatctttctttgatccagcggagaacattattcattcatcggcattatacaatatatttattagttgcatacacacacagagtatacgtatatgctaataattcagatgtgttcatacacacttccattgtcatgtgtagttcgttgcgacttacattacagactgccttagatgattcaggtatactgtatacaacatgatgcacagtatagtaggagtaagtgcaccagtctcagcagctggtagctagctagctatgtaaaattcctccttaattacagctatgtaacatatatatacagttattattacttactgatatgatctatctatcaaaaaaaaaaa

SEQ ID NO: 364 - protein, 320 aa, Zea mays
MDQAAEESCVPPGFRFHPTEEELVGYYLARKVASQRIDLDIIQEVDLYRIEPWDLQERCKPQHAGGGHDEQTQEWYFFSYKDRKYPSGTRTNRATAAGFWKATGRDKPVLSSSTRTTRCSRVIGMRKTLVFYKGRAPNGRKSDWIMHEYRLQSNEHAPAQEEGWVVCRAFQKPIPNQRPFFPTSYAGYYDHNLSTTARLHVDGDRHFLAGSSAAAAALLQQPPGLAGSSFPQLYSDDDLESKKQLLSIPPLESPTAMACCSDAGGYAQRSSYDEHEMMMMMIQQGGGGGEQAAAAIDWNFLDSLLSATSQLHGPSGSLLQ

SEQ ID NO: 365 - protein, 214 aa, Oryza sativa
MCGGAIISDFIPQREAHRAATGSKRALCASDFWPSASQEAADFDHLTAPCTFTPDQEEPTKKRERKTLYRGIRRRPWGKWAAEIRDPAKGARVWLGTFATAEAAARAYDRAARRIRGAKAKVNFPNEDPPLDDPAADGHSHGGAAIPCREFMDYDAVMAGFFHQPYVVADGVPAVPAEEAPTVAYVHHHLPPQPQQDAGLELWSFDNIHTAVPM

SEQ ID NO: 366 - protein, 334 aa, Oryza sativa; identical to SEQ ID NO: 146

SEQ ID NO: 367 - protein, 362 aa, Oryza sativa; identical to SEQ ID NO: 132

SEQ ID NO: 368 - protein, 396 aa, Oryza sativa; identical to SEQ ID NO: 154

SEQ ID NO: 369 - protein, 396 aa, Oryza sativa; identical to SEQ ID NO: 154

SEQ ID NO: 370 - protein, 358 aa, Arabidopsis thaliana; identical to SEQ ID NO: 160

SEQ ID NO: 371 - protein, 232 aa, Oryza sativa; identical to SEQ ID NO: 188

SEQ ID NO: 372 - protein, 140 aa, Oryza sativa
MTMMPSGGGARVRAHFRGVQWRKSGRWSAEIRSRGAWGRRRRLWIGTYDTAEEAARAYDAEARRLHGAKAKTNFPPPPPPTAVHDDHVDLEAHIKFLSEVELDGDQETPPESQVGDDQAGGQHQHHHGCRLDHLLLMMCN

SEQ ID NO: 373 - protein, 323 aa, Oryza sativa
MCGGGPDNHHAITVAADLPPPPPSVVAVEMAPPRGHRPGKEVEYNEEEEDDDDEYDGREFEEEFLRFSMMVDEEDDDGDDDDEVEVEIIAVVSPPHRPLVGARGTTSAVESVTNLQARTSPLPNPVVPQTGTKASKRGDSGAKAKPAAAKKRRSKHGFLGVHQRTYGRWSAEIRDNVIKGSRFWIGTFDTALDAALAYDAVSRRLYGLNAKTNFPAAAGEDDLPPPPPPAKPCSSTKRPKKCNTSGDLGAAAAPPQAVDTPAAAAAGVELTSLLCSVAAQAQEVSDGWEFIQELLLLGGGVSPLDYLNGQELAGAAVGDLWSF

1. A method for enhancing a yield-related trait in a plant relative to a control plant, comprising:
(i) modulating expression in a plant of a nucleic acid encoding a NAC transcription factor, wherein the amino acid sequence of said NAC transcription factor, when used in the construction of a NAC phylogenetic tree, such as the one depicted in FIG. 1, tends to cluster with the group of NACs comprising the amino acid sequence of SEQ ID NO: 51, SEQ ID NO: 53, SEQ ID NO: 55, SEQ ID NO: 57 or SEQ ID NO: 59 rather than with any other NAC group;
(ii) modulating expression in a plant of a nucleic acid encoding an AP2-2 polypeptide, wherein said AP2-2 polypeptide comprises motif XII (SEQ ID NO: 133);
or
(iii) modulating expression in a plant of a nucleic acid encoding an APETELA2-70-like (AP2-70-like) polypeptide, wherein said AP2-70-like polypeptide having at least 50% sequence identity to the amino acid sequence of SEQ ID NO: 258 and comprises:
(a) an AP2 DNA-binding domain comprising the amino acid sequence of SEQ ID NO: 332, or a domain having at least 50% sequence identity to SEQ ID NO: 332;
(b) Motif I of SEQ ID NO: 333; and
(c) Motif XIX of SEQ ID NO: 334.

2. The method of claim 1, wherein said nucleic acid encodes a NAC transcription factor, wherein said NAC transcription factor, when used in the construction of a NAC phylogenetic tree, such as the one depicted in FIG. 1, tends to cluster with the group of NACs comprising the amino acid sequence of SEQ ID NO: 53 rather than with any other NAC group, and wherein said plant is grown under abiotic stress conditions.

3. The method of claim 1, wherein:
(i) said NAC transcription factor comprises any one or more of the following motifs:
(a) Motif IV of SEQ ID NO: 111, or a motif having at least 50% sequence identity to SEQ ID NO: 111;
(b) Motif V of SEQ ID NO: 112, or a motif having at least 50% sequence identity to SEQ ID NO: 112;
(c) Motif VI of SEQ ID NO: 113, or a motif having at least 50% sequence identity to SEQ ID NO: 113;
(d) Motif VII of SEQ ID NO: 114, or a motif having at least 50% sequence identity to SEQ ID NO: 114;
(e) Motif VIII of SEQ ID NO: 115, or a motif having at least 50% sequence identity to SEQ ID NO: 115;
(f) Motif IX of SEQ ID NO: 116, or a motif having at least 50% sequence identity to SEQ ID NO: 116;
(g) Motif X of SEQ ID NO: 117, or a motif having at least 50% sequence identity to SEQ ID NO: 117; and
(h) Motif XI of SEQ ID NO: 118, or a motif having at least 50% sequence identity to SEQ ID NO: 118;
(ii) said AP2-2 polypeptide comprises one or more of motif XIII (SEQ ID NO: 134), motif XIV (SEQ ID NO: 135), motif XV (SEQ ID NO: 136), motif XVI (SEQ ID NO: 137), and motif XVII (SEQ ID NO: 138);
(iii) said AP2-2 polypeptide has at least 50% sequence identity to the amino acid sequence of SEQ ID NO: 132;
or
(iv) said AP2-70-like polypeptide further comprises one or more of the following motifs:
(a) Motif XX of SEQ ID NO: 335, or a motif having at least 50% sequence identity to SEQ ID NO: 335;
(b) Motif XXI of SEQ ID NO: 336, or a motif having at least 50% sequence identity to SEQ ID NO: 336;
(c) Motif XXII of SEQ ID NO: 337, or a motif having at least 50% sequence identity to SEQ ID NO: 337; and/or
(d) Motif XXIII of SEQ ID NO: 338, or a motif having at least 50% sequence identity to SEQ ID NO: 338.

4. The method of claim 1, wherein:
(i) said nucleic acid encoding a NAC transcription factor is any one of the nucleic acids given in Table 4 or a portion thereof, or a sequence capable of hybridizing with any one of the nucleic acids given in Table 4;
(ii) said nucleic acid encoding an AP2-2 polypeptide is any one of the nucleic acids given in Table 14 or a portion thereof, or a sequence capable of hybridizing with any one of the nucleic acids given in Table 14;
(iii) said nucleic acid encodes an orthologue or paralogue of any of the polypeptides given in Table 14;
(iv) said nucleic acid encoding an AP2-70-like polypeptide is any one of the nucleic acids given in Table 18 or a portion thereof, or a sequence capable of hybridizing with any one of the nucleic acids given in Table 18; or
(v) said nucleic acid encodes an orthologue or paralogue of any of the polypeptides given in Table 18.

5. The method of claim 1, wherein:
(i) said nucleic acid encodes a NAC transcription factor, and wherein said modulated expression is effected by any one or more of T-DNA activation tagging, TILLING, or homologous recombination;
(ii) said nucleic acid encodes a NAC transcription factor, and wherein said modulated expression is effected by introducing and expressing in a plant a nucleic acid encoding a NAC transcription factor, wherein the amino acid sequence of said NAC transcription factor, when used in the construction of a NAC phylogenetic tree, such as the one depicted in FIG. 1, tends to cluster with the group of NACs comprising the amino acid sequence of SEQ ID NO: 51, SEQ ID NO: 53, SEQ ID NO: 55, SEQ ID NO: 57 or SEQ ID NO: 59 rather than with any other NAC group;
(iii) said nucleic acid encodes an AP2-2 polypeptide, and wherein said modulated expression is effected by introducing and expressing in a plant a nucleic acid encoding said AP2-2 polypeptide; or
(iv) said nucleic acid encodes an AP2-70-like polypeptide, and wherein said modulated expression is effected by introducing and expressing in a plant a nucleic acid encoding said AP2-70-like polypeptide.

6. The method of claim 1, wherein:
(i) said nucleic acid encodes a NAC transcription factor, and wherein said enhanced yield-related trait is increased aboveground area, increased seed yield, and/or increased early vigour relative to a control plant;
(ii) said nucleic acid encodes an AP2-2 polypeptide, and wherein said enhanced yield-related trait is increased yield and/or increased seed yield relative to a control plant; or
(iii) said nucleic acid encodes an AP2-70-like polypeptide, and wherein said enhanced yield-related trait is increased yield and/or increased seed yield relative to a control plant.

7. The method of claim 1, wherein:
(i) said nucleic acid encodes a NAC transcription factor, and wherein said nucleic acid is operably linked to a root-specific promoter or an RCc3 promoter;
(ii) said nucleic acid encodes a NAC transcription factor, and wherein said nucleic acid is operably linked to a constitutive promoter or a GOS2 promoter;
(iii) said nucleic acid encodes an AP2-2 polypeptide, and wherein said nucleic acid is operably linked to a constitutive promoter or a GOS2 promoter;
(iv) said nucleic acid encodes an AP2-70-like polypeptide, and wherein said nucleic acid is operably linked to a constitutive promoter, a GOS2 promoter, or a GOS2 promoter from rice; or
(v) said nucleic acid encodes an AP2-70-like polypeptide, and wherein said nucleic acid is operably linked to a root-specific promoter, an RCC3 promoter, or an RCC3 promoter from rice.

8. The method of claim 1, wherein said nucleic acid is of plant origin, from a monocotyledonous plant, from a plant of the family Poaceae, from a plant of the genus Oryza, or from an Oryza sativa plant.

9. A plant obtained from the method of claim 1, or a plant cell, plant part, seed, or progeny thereof, wherein said plant, or said plant cell, plant part, seed, or progeny thereof, comprises a recombinant nucleic acid encoding said NAC transcription factor, said AP2-2 polypeptide, or said AP2-70-like polypeptide.

10. A construct comprising:
(i) a nucleic acid encoding a NAC transcription factor, an AP2-2 polypeptide, or an AP2-70-like polypeptide as defined in claim 1;
(ii) one or more heterologous control sequences capable of driving expression of the nucleic acid of (i); and optionally
(iii) a transcription termination sequence.

11. The construct of claim 10, wherein said one or more control sequences is a constitutive promoter or a GOS2 promoter.

12. The construct of claim 10, wherein said nucleic acid encodes a NAC transcription factor or an AP2-70-like polypeptide, and wherein said one or more control sequences is a root-specific promoter or an RCc3 promoter.

13. A plant, plant cell or plant part comprising the construct of claim 10.

14. A method for making a plant having increased seed yield and/or increased aboveground area relative to a control plant, comprising transforming the construct of claim 10 into a plant, plant cell or plant part.

15. A method for the production of a transgenic plant having an enhanced yield-related trait relative to a control plant, comprising:
(i) introducing and expressing in a plant a nucleic acid encoding a NAC transcription factor, an AP2-2 polypeptide, or an AP2-70-like polypeptide as defined in claim 1;
(ii) cultivating the plant under conditions promoting plant growth and development.

16. An isolated nucleic acid molecule comprising:
(i) the nucleotide sequence of SEQ ID NO: 257, SEQ ID NO: 341, SEQ ID NO: 343, SEQ ID NO: 345, SEQ ID NO: 347, SEQ ID NO: 349, SEQ ID NO: 351, SEQ ID NO: 353, SEQ ID NO: 355, SEQ ID NO: 357, SEQ ID NO: 359, SEQ ID NO: 361, or SEQ ID NO: 363;
(ii) the complement of the nucleotide sequence of SEQ ID NO: 257, SEQ ID NO: 341, SEQ ID NO: 343, SEQ ID NO: 345, SEQ ID NO: 347, SEQ ID NO: 349, SEQ ID NO: 351, SEQ ID NO: 353, SEQ ID NO: 355, SEQ ID NO: 357, SEQ ID NO: 359, SEQ ID NO: 361, or SEQ ID NO: 363;
(iii) a nucleotide sequence encoding an AP2-70-like polypeptide having at least 50% sequence identity to the amino acid sequence of SEQ ID NO: 258 and comprising a domain having at least 50% sequence identity to SEQ ID NO: 331;
(iv) a nucleotide sequence encoding a NAC polypeptide having at least 50% sequence identity to the amino acid sequence of SEQ ID NO: 348, SEQ ID NO: 350, SEQ ID NO: 352, SEQ ID NO: 354, SEQ ID NO: 356, SEQ ID NO: 358, SEQ ID NO: 360, SEQ ID NO: 362, or SEQ ID NO: 364; or
(v) a nucleic acid encoding a polypeptide having at least 50% sequence identity to the amino acid sequence of SEQ ID NO: 342, SEQ ID NO: 344, or SEQ ID NO: 346.

17. An isolated polypeptide encoded by the nucleic acid molecule of claim 16, wherein said polypeptide comprises:
(i) the amino acid sequence of SEQ ID NO: 258, SEQ ID NO: 342, SEQ ID NO: 344, SEQ ID NO: 346, SEQ ID NO: 348, SEQ ID NO: 350, SEQ ID NO: 352, SEQ ID NO: 354, SEQ ID NO: 356, SEQ ID NO: 358, SEQ ID NO: 360, SEQ ID NO: 362, or SEQ ID NO: 364;
(ii) an amino acid sequence having at least 50% sequence identity to the amino acid sequence of SEQ ID NO: 258 and comprising a domain having at least 50% sequence identity to SEQ ID NO: 331;
(iii) an amino acid sequence having at least 50% sequence identity to the amino acid sequence of SEQ ID NO: 342, SEQ ID NO: 344, SEQ ID NO: 346, SEQ ID NO: 348, SEQ ID NO: 350, SEQ ID NO: 352, SEQ ID NO: 354, SEQ ID NO: 356, SEQ ID NO: 358, SEQ ID NO: 360, SEQ ID NO: 362, or SEQ ID NO: 364; or
(iv) derivatives of any of the amino acid sequences given in (i) or (ii) above.
